(19) United States
(12) Patent Application Publication
(10) Pub. No.: US 2012/0230975 A1
(43) Pub. Date: Sep. 13, 2012

(54) FUSION PROTEINS

(75) Inventors: Keith Foster, Salisbury (GB); John Chaddock, Salisbury (GB); Philip Marks, Abingdon (GB); Patrick Stancombe, Salisbury (GB); Kei Roger Aoki, Irvine, CA (US); Joseph Francis, Irvine, CA (US); Lance Steward, Irvine, CA (US)

(73) Assignees: ALLERGAN, INC., Irvine, CA (US); SYNTAXIN LIMITED, Abingdon (GB)

(21) Appl. No.: 13/419,381

(22) Filed: Mar. 13, 2012

Related U.S. Application Data
(63) Continuation-in-part of application No. 12/303,078, filed on Sep. 21, 2009, now abandoned.

(30) Foreign Application Priority Data
Jun. 1, 2006 (GB) 0610867.4

(51) Int. Cl. A61K 38/48; C12N 9/52; A61P 25/00; C12N 15/63; A61P 29/00; C12N 9/50; C12N 15/62

(52) U.S. Cl. 424/94.63; 435/219; 435/220; 536/23.2; 435/320.1

(57) ABSTRACT

A single chain, polypeptide fusion protein, comprising: a non-cytotoxic protease, or a fragment thereof, which protease or protease fragment can cleave a protein of the exocytic fusion apparatus of a nociceptive sensory afferent; a Targeting Moiety that can bind to a Binding Site on the nociceptive sensory afferent, which Binding Site can undergo endocytosis to be incorporated into an endosome within the nociceptive sensory afferent; a protease cleavage site at which site the fusion protein is cleavable by a protease, which is located between the non-cytotoxic protease and the Targeting Moiety; and a translocation domain that can translocate the protease or protease fragment from within an endosome, across the endosomal membrane and into the cytosol of the nociceptive sensory afferent; wherein the Targeting Moiety is BAM, β-endorphin, bradykinin, substance P, dynorphin and/or nociceptin. Nucleic acid sequences encoding the fusion proteins, methods of preparing same and uses thereof are also described.

### CROSS-REFERENCES TO RELATED APPLICATIONS

[0001] This application is a continuation-in-part of U.S. application Ser. No. 12/303,078, filed Sep. 21, 2009, which is a National Stage of International Application No. PCT/GB2007/002049, filed Jun. 1, 2007, which claims priority of Application No. GB 0610867.4, filed Jun. 1, 2006, the disclosures of which are incorporated herein.

### STATEMENT REGARDING SEQUENCE LISTING

[0002] The sequence listing associated with this application is provided in text format in lieu of a paper copy and is hereby incorporated by reference into the specification. The name of the text file containing the sequence listing is 39083_SEQ_FINAL_{—}2012-03-09.txt. The text file is 763 KB; was created on Mar. 9, 2012; and is being submitted via EFS-Web with the filing of the specification.

### FIELD OF THE INVENTION

[0003] This invention relates to non-cytotoxic fusion proteins and to the therapeutic application thereof as analgesic molecules.

### BACKGROUND

[0004] Toxins may be generally divided into two groups according to the type of effect that they have on a target cell. In more detail, the first group of toxins kill their natural target cells, and are therefore known as cytotoxic toxin molecules. This group of toxins is exemplified inter alia by plant toxins such as ricin, and abrin, and by bacterial toxins such as diphtheria toxin, and Pseudomonas exotoxin A. Cytotoxic toxins have attracted much interest in the design of “magic bullets” (e.g., immunoconjugates, which comprise a cytotoxic toxin component and an antibody that binds to a specific marker on a target cell) for the treatment of cellular disorders and conditions such as cancer. Cytotoxic toxins typically kill their target cells by inhibiting the cellular process of protein synthesis.

[0005] The second group of toxins, which are known as non-cytotoxic toxins, do not (as their name confirms) kill their natural target cells. Non-cytotoxic toxins have attracted much less commercial interest than have their cytotoxic counterparts, and exert their effects on a target cell by inhibiting cellular processes other than protein synthesis. Non-cytotoxic toxins are produced by a variety of plants, and by a variety of microorganisms such as Clostridium sp. and Neisseria sp.

[0006] Clostridial neurotoxins are proteins that typically have a molecular mass of the order of 150 kDa. They are produced by various species of bacteria, especially of the genus Clostridium, most importantly C. tetani and several strains of C. botulinum, C. butyricum and C. argentinense. There are at present eight different classes of the clostridial neurotoxin, namely: tetanus toxin, and botulinum neurotoxin in its serotypes A, B, C1, D, E, F and G, and they all share similar structures and modes of action.

[0007] Clostridial neurotoxins represent a major group of non-cytotoxic toxin molecules, and are synthesised by the host bacterium as single polypeptides that are modified post-translationally by a proteolytic cleavage event to form two polypeptide chains joined together by a disulphide bond. The two chains are termed the heavy chain (H-chain), which has a molecular mass of approximately 100 kDa, and the light chain (L-chain), which has a molecular mass of approximately 50 kDa.

[0008] L-chains possess a protease function (zinc-dependent endopeptidase activity) and exhibit a high substrate specificity for vesicle and/or plasma membrane associated proteins involved in the exocytic process. L-chains from different clostridial species or serotypes may hydrolyse different but specific peptide bonds in one of three substrate proteins, namely synaptobrevin, syntaxin or SNAP-25. These substrates are important components of the neurosecretory machinery.

[0009] Neisseria sp., most importantly from the species N. gonorrhoeae, produce functionally similar non-cytotoxic proteases. An example of such a protease is IgA protease (see WO99/58571).

[0010] It has been well documented in the art that toxin molecules may be re-targeted to a cell that is not the toxin's natural target cell. When so re-targeted, the modified toxin is capable of binding to a desired target cell and, following subsequent translocation into the cytosol, is capable of exerting its effect on the target cell. Said re-targeting is achieved by replacing the natural Targeting Moiety (TM) of the toxin with a different TM. In this regard, the TM is selected so that it will bind to a desired target cell, and allow subsequent passage of the modified toxin into an endosome within the target cell. The modified toxin also comprises a translocation domain to enable entry of the non-cytotoxic protease into the cell cytosol. The translocation domain can be the natural translocation domain of the toxin or it can be a different translocation domain obtained from a microbial protein with translocation activity.

[0011] The above-mentioned TM replacement may be effected by conventional chemical conjugation techniques, which are well known to a skilled person. In this regard, reference is made to Hermanson, G. T. (1996), Bioconjugate techniques, Academic Press, and to Wong, S. S. (1991), Chemistry of protein conjugation and cross-linking, CRC Press. Alternatively, recombinant techniques may be employed, such as those described in WO98/07864.

[0012] Pain-sensing cells possess a wide range of receptor types. However, not all receptor types are suited (least of all desirable) for receptor-mediated endocytosis. Similarly, binding properties can vary widely between different TMs for the same receptor, and even more so between different TMs and different receptors.

[0013] There is therefore a need to develop modified non-cytotoxic fusion proteins that address one or more of the above problems. Of particular interest is the development of an alternative/improved non-cytotoxic fusion protein for use in treating pain.

[0014] The present invention seeks to address one or more of the above problems by providing unique fusion proteins. In one embodiment, the Targeting Moiety (TM) component employed with a fusion protein of the present invention is an “agonist” of a receptor that is present on the pain-sensing target cell of interest. In one embodiment, the pain-sensing target cell is a nociceptive sensory afferent, for example a primary nociceptive sensory afferent.

### SUMMARY

[0015] This summary is provided to introduce a selection of concepts in a simplified form that are further described below in the Detailed Description. This summary is not intended to identify key features of the claimed subject matter, nor is it intended to be used as an aid in determining the scope of the claimed subject matter.

[0016] The present invention addresses one or more of the above-mentioned problems by providing a single chain, polypeptide fusion protein, comprising:

[0017] a. a non-cytotoxic protease, or a fragment thereof, which protease or protease fragment is capable of cleaving a protein of the exocytic fusion apparatus in a nociceptive sensory afferent;

[0018] b. a Targeting Moiety that is capable of binding to a Binding Site on the nociceptive sensory afferent, which Binding Site is capable of undergoing endocytosis to be incorporated into an endosome within the nociceptive sensory afferent;

[0019] c. a protease cleavage site at which site the fusion protein is cleavable by a protease, wherein the protease cleavage site is located between the non-cytotoxic protease or fragment thereof and the Targeting Moiety; and

[0020] d. a translocation domain that is capable of translocating the protease or protease fragment from within an endosome, across the endosomal membrane and into the cytosol of the nociceptive sensory afferent.

### DESCRIPTION OF THE DRAWINGS

[0021] The foregoing aspects and many of the attendant advantages of this invention will become more readily appreciated as the same become better understood by reference to the following detailed description, when taken in conjunction with the accompanying drawings, wherein:

[0022] FIG. 1—Purification of a LC/A-nociceptin-H_{N}/A Fusion Protein

[0023] Using the methodology outlined in Example 9, a LC/A-nociceptin-HN/A fusion protein was purified from E. coli BL21 cells. Briefly, the soluble products obtained following cell disruption were applied to a nickel-charged affinity capture column. Bound proteins were eluted with 100 mM imidazole, treated with Factor Xa to activate the fusion protein and remove the maltose-binding protein (MBP) tag, then re-applied to a second nickel-charged affinity capture column. Samples from the purification procedure were assessed by SDS-PAGE (Panel A) and Western blotting (Panel B). Anti-nociceptin antisera (obtained from Abcam) were used as the primary antibody for Western blotting. The final purified material in the absence and presence of reducing agent is identified in the lanes marked (−) and (+) respectively.

[0024] FIG. 2—Purification of a nociceptin-LC/A-H_{N}/A Fusion Protein

[0025] Using the methodology outlined in Example 9, a nociceptin-LC/A-H_{N}/A fusion protein was purified from E. coli BL21 cells. Briefly, the soluble products obtained following cell disruption were applied to a nickel-charged affinity capture column. Bound proteins were eluted with 100 mM imidazole, treated with Factor Xa to activate the fusion protein and remove the maltose-binding protein (MBP) tag, then re-applied to a second nickel-charged affinity capture column. Samples from the purification procedure were assessed by SDS-PAGE (Panel A) and Western blotting (Panel B). Anti-nociceptin antisera (obtained from Abcam) were used as the primary antibody for Western blotting. The final purified material in the absence and presence of reducing agent is identified in the lanes marked (−) and (+) respectively.

[0026] FIG. 3—Purification of a LC/C-nociceptin-H_{N}/C Fusion Protein

[0027] Using the methodology outlined in Example 9, an LC/C-nociceptin-H_{N}/C fusion protein was purified from E. coli BL21 cells. Briefly, the soluble products obtained following cell disruption were applied to a nickel-charged affinity capture column. Bound proteins were eluted with 100 mM imidazole, treated with Factor Xa to activate the fusion protein and remove the maltose-binding protein (MBP) tag, then re-applied to a second nickel-charged affinity capture column. Samples from the purification procedure were assessed by SDS-PAGE (Panel A) and Western blotting (Panel B). Anti-nociceptin antisera (obtained from Abcam) were used as the primary antibody for Western blotting. The final purified material in the absence and presence of reducing agent is identified in the lanes marked (−) and (+) respectively.

[0028] FIG. 4—Purification of a LC/A-met enkephalin-H_{N}/A Fusion Protein

[0029] Using the methodology outlined in Example 9, an LC/A-met enkephalin-H_{N}/A fusion protein was purified from E. coli BL21 cells. Briefly, the soluble products obtained following cell disruption were applied to a nickel-charged affinity capture column. Bound proteins were eluted with 100 mM imidazole, treated with Factor Xa to activate the fusion protein and remove the maltose-binding protein (MBP) tag, then re-applied to a second nickel-charged affinity capture column. Samples from the purification procedure were assessed by SDS-PAGE. The final purified material in the absence and presence of reducing agent is identified in the lanes marked (−) and (+) respectively.

[0030] FIG. 5—Comparison of Binding Efficacy of a LC/A-nociceptin-H_{N}/A Fusion Protein and a nociceptin-LC/A-H_{N}/A Fusion Protein

[0031] The ability of nociceptin fusions to bind to the ORL₁ receptor was assessed using a simple competition-based assay. Primary cultures of dorsal root ganglia (DRG) were exposed to varying concentrations of test material in the presence of 1 nM [³H]-nociceptin. The reduction in specific binding of the radiolabelled ligand was assessed by scintillation counting, and plotted in comparison to the efficacy of unlabelled ligand (Tocris nociceptin). It is clear that the LC/A-nociceptin-H_{N}/A fusion is far superior to the nociceptin-LC/A-H_{N}/A fusion at interacting with the ORL₁ receptor.

[0032] FIG. 6—In Vitro Catalytic Activity of a LC/A-nociceptin-H_{N}/A Fusion Protein

[0033] The in vitro endopeptidase activity of the purified LC/A-nociceptin-H_{N}/A fusion protein was determined essentially as described in Chaddock et al. 2002, Prot. Express Purif. 25:219-228. Briefly, SNAP-25 peptide immobilised to an ELISA plate was exposed to varying concentrations of fusion protein for 1 hour at 37° C. Following a series of washes, the amount of cleaved SNAP-25 peptide was quantified by reactivity with a specific antisera.

[0034] FIG. 7—Purification of a LC/A-nociceptin variant-H_{N}/A Fusion Protein

[0035] Using the methodology outlined in Example 9, an LC/A-nociceptin variant-H_{N}/A fusion protein was purified from E. coli BL21 cells. Briefly, the soluble products obtained following cell disruption were applied to a nickel-charged affinity capture column. Bound proteins were eluted with 100 mM imidazole, treated with Factor Xa to activate the fusion protein and remove the maltose-binding protein (MBP) tag, then re-applied to a second nickel-charged affinity capture column. Samples from the purification procedure were assessed by SDS-PAGE. The final purified material in the absence and presence of reducing agent is identified in the lanes marked (−) and (+) respectively.

[0036] FIG. 8—Comparison of Binding Efficacy of a LC/A-nociceptin-H_{N}/A Fusion Protein and a LC/A-nociceptin variant-H_{N}/A Fusion Protein

[0037] The ability of nociceptin fusions to bind to the ORL₁ receptor was assessed using a simple competition-based assay. Primary cultures of dorsal root ganglia (DRG) were exposed to varying concentrations of test material in the presence of 1 nM [³H]-nociceptin. The reduction in specific binding of the radiolabelled ligand was assessed by scintillation counting, and plotted in comparison to the efficacy of unlabelled ligand (Tocris nociceptin). It is clear that the LC/A-nociceptin variant-H_{N}/A fusion (CPNv-LHA) is superior to the LC/A-nociceptin variant-H_{N}/A fusion (CPN-LHA) at interacting with the ORL₁ receptor.

[0038] FIG. 9—Expressed/Purified LC/A-nociceptin-H_{N}/A Fusion Protein Family with Variable Spacer Length Product(s)

[0039] Using the methodology outlined in Example 9, variants of the LC/A-CPN-H_{N}/A fusion consisting of GS10, GS30 and Hx27 are purified from E. coli cell paste. Samples from the purification of LC/A-CPN(GS10)-H_{N}/A, LC/A-CPN(GS15)-H_{N}/A, LC/A-CPN(GS25)-H_{N}/A, LC/A-CPN(GS30)-H_{N}/A and LC/A-CPN(Hx27)-H_{N}/A were assessed by SDS-PAGE prior to staining with Coomassie Blue. The electrophoresis profile indicates purification of a disulphide-bonded di-chain species of the expected molecular mass of CPBE-A. Top panel: M=benchmark molecular mass markers; S=total E. coli protein soluble fraction; FT=proteins that did not bind to the Ni²⁺-charged Sepharose column; FUSION=fusion protein eluted by the addition of imidazole. Bottom panel: Lane 1=benchmark molecular mass markers; Lane 2=total E. coli protein soluble fraction; Lane 3=purified material following initial capture on Ni²⁺-charged Sepharose; Lane 4=Factor Xa treated material prior to final capture on Ni²⁺-charged Sepharose; Lane 5=purified final material post activation with Factor Xa (5 μl); Lane 6=purified final material post activation with Factor Xa (10 μl); Lane 7=purified final material post activation with Factor Xa (20 μl); Lane 8=purified final material post activation with Factor Xa+DTT (5 μl); Lane 9=purified final material post activation with Factor Xa+DTT (10 μl); Lane 10=purified final material post activation with Factor Xa+DTT (20 μl).

[0040] FIG. 10—Inhibition of SP Release and Cleavage of SNAP-25 by CPN-A

[0041] Briefly, primary cultures of dorsal root ganglia (DRG) were exposed to varying concentrations of CPN-A for 24 hours. Cellular proteins were separated by SDS-PAGE, Western blotted, and probed with anti-SNAP-25 to facilitate an assessment of SNAP-25 cleavage. The percentage of cleaved SNAP-25 was calculated by densitometric analysis and plotted against fusion concentration (dashed line). Material was also recovered for an analysis of substance P content using a specific EIA kit. Inhibition of substance P release is illustrated by the solid line. The fusion concentration required to achieve 50% maximal SNAP-25 cleavage is estimated to be 6.30±2.48 nM.

[0042] FIG. 11—Inhibition of SP Release and Cleavage of SNAP-25 Over Extended Time Periods After Exposure of DRG to CPN-A

[0043] Primary cultures of dorsal root ganglia (DRG) were exposed to varying concentrations of CPN-A for 24 hours. Botulinum neurotoxin (BoNT/A) was used as a control. After this initial exposure, extracellular material was removed by washing, and the cells incubated at 37° C. for varying periods of time. At specific time points, cellular proteins were separated by SDS-PAGE, Western blotted, and probed with anti-SNAP-25 to facilitate an assessment of SNAP-25 cleavage. The percentage of cleaved SNAP-25 was calculated by densitometric analysis and illustrated by the dotted lines. Material was also recovered for an analysis of substance P content using a specific EIA kit. Inhibition of substance P release is illustrated by the solid lines.

[0044] FIG. 12—Cleavage of SNAP-25 by CPNv-A

[0045] Primary cultures of dorsal root ganglia (DRG) were exposed to varying concentrations of CPNv-A for 24 hours. Cellular proteins were separated by SDS-PAGE, Western blotted, and probed with anti-SNAP-25 to facilitate an assessment of SNAP-25 cleavage. The percentage of cleaved SNAP-25 was calculated by densitometric analysis. The fusion concentration required to achieve 50% maximal SNAP-25 cleavage is estimated to be 1.38±0.36 nM.

[0046] FIG. 13—Cleavage of SNAP-25 Over Extended Time Periods After Exposure of DRG to CPNv-A

[0047] Primary cultures of dorsal root ganglia (DRG) were exposed to varying concentrations of CPNv-A for 24 hours. CPN-A was used as a control. After this initial exposure, extracellular material was removed by washing, and the cells incubated at 37° C. for varying periods of time. At specific time points, cellular proteins were separated by SDS-PAGE, Western blotted, and probed with anti-SNAP-25 to facilitate an assessment of SNAP-25 cleavage. The percentage of cleaved SNAP-25 was calculated by densitometric analysis.

[0048] FIG. 14—CPNv-A Fusion-Mediated Displacement of [³H]-nociceptin Binding

[0049] The ability of nociceptin fusions to bind to the ORL₁ receptor was assessed using a simple competition-based assay. Primary cultures of dorsal root ganglia (DRG) were exposed to varying concentrations of test material in the presence of 1 nM [³H]-nociceptin. The reduction in specific binding of the radiolabelled ligand was assessed by scintillation counting, and plotted in comparison to the efficacy of unlabelled ligand (Tocris nociceptin). It is clear that the LC/A-nociceptin variant-H_{N}/A fusion (labelled as CPNv-LHnA) is superior to the LC/A-nociceptin-H_{N}/A fusion (labelled as CPN-LHnA) at interacting with the ORL₁ receptor.

[0050] FIG. 15—Expressed/Purified CPNv(EK)-A Product

[0051] Proteins were subjected to SDS-PAGE prior to staining with Coomassie Blue. The electrophoresis profile indicates purification of a disulphide-bonded di-chain species of the expected molecular mass of CPNv(Ek)-A. Lane 1=benchmark molecular mass markers; Lane 2=total E. coli protein soluble fraction; Lane 3=purified material following initial capture on Ni²⁺-charged Sepharose; Lane 4=purified final material post activation with enterokinase (5 μl); Lane 5=purified final material post activation with enterokinase (10 μl); Lane 6=purified final material post activation with enterokinase (20 μl); Lane 7=purified final material post activation with enterokinase+DTT (5 μl); Lane 8=purified final material post activation with enterokinase+DTT (10 μl); Lane 9=purified final material post activation with enterokinase+DTT (20 μl).

[0052] FIG. 16—Cleavage of SNAP-25 by CPNv(EK)-A

[0053] Primary cultures of dorsal root ganglia (DRG) were exposed to varying concentrations of CPNv(Ek)-A for 24 hours. Cellular proteins were separated by SDS-PAGE, Western blotted, and probed with anti-SNAP-25 to facilitate an assessment of SNAP-25 cleavage. The percentage of cleaved SNAP-25 was calculated by densitometric analysis. CPNv-A as prepared in Example 9 was used for comparison purposes. The percentage cleavage of SNAP-25 by CPNv(Ek)-A (labelled as En activated) and CPNv-A (labelled as Xa activated) are illustrated.

[0054] FIG. 17—Expressed/Purified CPNv-C Product

[0055] Proteins were subjected to SDS-PAGE prior to staining with Coomassie Blue. The electrophoresis profile indicates purification of a disulphide-bonded di-chain species of the expected molecular mass of CPNv-C. Lane 1=benchmark molecular mass markers; Lane 2=total E. coli protein soluble fraction; Lane 3=purified material following initial capture on Ni²⁺-charged Sepharose; Lane 4=Factor Xa treated material prior to final capture on Ni²⁺-charged Sepharose; Lane 5=purified material following second capture on Ni²⁺-charged Sepharose; Lane 6=final purified material; Lane 7=final purified material+DTT; Lane 8=benchmark molecular mass markers.

[0056] FIG. 18—Cleavage of SYNTAXIN by CPNv-C

[0057] Primary cultures of dorsal root ganglia (DRG) were exposed to varying concentrations of CPNv-C for 24 hours. Cellular proteins were separated by SDS-PAGE, Western blotted, and probed with anti-syntaxin to facilitate an assessment of syntaxin cleavage. The percentage of cleaved syntaxin was calculated by densitometric analysis. The fusion concentration required to achieve 50% maximal syntaxin cleavage is estimated to be 3.13±1.96 nM.

[0058] FIG. 19—CPN-A Efficacy in the Acute Capsaicin-Induced Mechanical Allodynia Model

[0059] The ability of an LC/A-nociceptin-H_{N}/A fusion (CPN/A) to inhibit capsaicin-induced mechanical allodynia was evaluated following subcutaneous intraplantar injection in the rat hind paw. Test animals were evaluated for paw withdrawal frequency (PWF %) in response to a 10 g Von Frey filament stimulus series (10 stimuli×3 trials) prior to recruitment into the study (Pre-Treat); after subcutaneous intraplantar treatment with CPN/A but before capsaicin (Pre-CAP); and following capsaicin challenge post-injection of CPN/A (average of responses at 15′ and 30′; CAP). Capsaicin challenge was achieved by injection of 10 μl of a 0.3% solution. Sample dilutions were prepared in 0.5% BSA/saline.

[0060] FIG. 20—CPN-A Efficacy in the Streptozotocin (STZ)-Induced Peripheral Diabetic Neuropathy (Neuropathic Pain) Model

[0061] Male Sprague-Dawley rats (250-300 g) are treated with 65 mg/kg STZ in citrate buffer (I.V.) and blood glucose and lipid are measured weekly to define the readiness of the model. Paw Withdrawal Threshold (PWT) is measured in response to a Von Frey filament stimulus series over a period of time. Allodynia is said to be established when the PWT on two consecutive test dates (separated by 1 week) measures below 6 g on the scale. At this point, rats are randomized to either a saline group (negative efficacy control), gabapentin group (positive efficacy control) or a test group (CPN/A). Test materials (20-25 μl) are injected subcutaneously as a single injection (except gabapentin) and the PWT is measured at 1 day post-treatment and periodically thereafter over a 2 week period. Gabapentin (30 mg/kg i.p. @ 3 ml/kg injection volume) is injected daily, 2 hours prior to the start of PWT testing.

[0062] FIG. 21—CPNv-A Efficacy in the Acute Capsaicin-Induced Mechanical Allodynia Model

[0063] The ability of an LC/A-nociceptin variant-H_{N}/A fusion (CPNv/A) to inhibit capsaicin-induced mechanical allodynia was evaluated following subcutaneous intraplantar injection in the rat hind paw. Test animals were evaluated for paw withdrawal frequency (PWF %) in response to a 10 g Von Frey filament stimulus series (10 stimuli×3 trials) prior to recruitment into the study (Pre-Treat), after subcutaneous intraplantar treatment with CPNv/A but before capsaicin (Pre-CAP), and following capsaicin challenge post-injection of CPNv/A (average of responses at 15′ and 30′; CAP). Capsaicin challenge was achieved by injection of 10 μl of a 0.3% solution. Sample dilutions were prepared in 0.5% BSA/saline. These data are expressed as a normalized paw withdrawal frequency differential, in which the difference between the peak response (post-capsaicin) and the baseline response (pre-capsaicin) is expressed as a percentage. With this analysis, it can be seen that CPNv/A is more potent than CPN/A since a lower dose of CPNv/A is required to achieve similar analgesic effect to that seen with CPN/A.

[0064] FIG. 22—Expressed/Purified LC/A-CPLE-H_{N}/A Product

[0065] Proteins were subjected to SDS-PAGE prior to staining with Coomassie Blue. The electrophoresis profile indicates purification of a disulphide-bonded di-chain species of the expected molecular mass of CPLE-A. Lane 1=benchmark molecular mass markers; Lane 2=total E. coli protein soluble fraction; Lane 3=purified material following initial capture on Ni²⁺-charged Sepharose; Lane 4=Factor Xa treated material prior to final capture on Ni²⁺-charged Sepharose; Lane 5=purified material following second capture on Ni²⁺-charged Sepharose; Lane 6=final purified material; Lane 7=final purified material+DTT.

[0066] FIG. 23—Expressed/Purified LC/A-CPBE-H_{N}/A Product

[0067] Proteins were subjected to SDS-PAGE prior to staining with Coomassie Blue. The electrophoresis profile indicates purification of a disulphide-bonded di-chain species of the expected molecular mass of CPBE-A. Lane 1=total E. coli protein soluble fraction; Lane 2=purified material following initial capture on Ni²⁺-charged Sepharose; Lane 3=Factor Xa treated material prior to final capture on Ni²⁺-charged Sepharose; Lane 4=purified final material post activation with Factor Xa (5 μl); Lane 5=purified final material post activation with Factor Xa (10 μl); Lane 6=purified final material post activation with Factor Xa (20 μl); Lane 7=purified final material post activation with Factor Xa+DTT (5 μl); Lane 8=purified final material post activation with Factor Xa+DTT (10 μl); Lane 9=purified final material post activation with Factor Xa+DTT (20 μl); Lane 10=benchmark molecular mass markers.

[0068] FIG. 24—Expressed/Purified CPOP-A Product

[0069] Proteins were subjected to SDS-PAGE prior to staining with Coomassie Blue. The electrophoresis profile indicates purification of a disulphide-bonded di-chain species of the expected molecular mass of CPOP-A. Lane 1=benchmark molecular mass markers; Lane 2=purified material following initial capture on Ni²⁺-charged Sepharose; Lane 3=Factor Xa treated material prior to final capture on Ni²⁺-charged Sepharose; Lane 4=purified material following second capture on Ni²⁺-charged Sepharose; Lane 5=purified final material post activation with Factor Xa (5 μl); Lane 6=purified final material post activation with Factor Xa (10 μl); Lane 7=purified final material post activation with Factor Xa (20 μl); Lane 8=purified final material post activation with Factor Xa+DTT (5 μl); Lane 9=purified final material post activation with Factor Xa+DTT (10 μl); Lane 10=purified final material post activation with Factor Xa+DTT (20 μl).

[0070] FIG. 25—Expressed/Purified CPOPv-A Product

[0071] Proteins were subjected to SDS-PAGE prior to staining with Coomassie Blue. The electrophoresis profile indicates purification of a disulphide-bonded di-chain species of the expected molecular mass of CPOPv-A. Lane 1=benchmark molecular mass markers; Lane 2=total E. coli protein soluble fraction; Lane 3=purified material following initial capture on Ni²⁺-charged Sepharose; Lane 4=Factor Xa treated material prior to final capture on Ni²⁺-charged Sepharose; Lane 5=purified final material post activation with Factor Xa (5 μl); Lane 6=purified final material post activation with Factor Xa (10 μl); Lane 7=purified final material post activation with Factor Xa (20 μl); Lane 8=purified final material post activation with Factor Xa+DTT (5 μl); Lane 9=purified final material post activation with Factor Xa+DTT (10 μl); Lane 10=purified final material post activation with Factor Xa+DTT (20 μl).

[0072] FIG. 26—In Vitro SNAP-25 Cleavage in a DRG CELL Model

[0073] Primary cultures of dorsal root ganglia (DRG) were exposed to varying concentrations of CPOPv-A for 24 hours. Cellular proteins were separated by SDS-PAGE, Western blotted, and probed with anti-SNAP-25 to facilitate an assessment of SNAP-25 cleavage. The percentage of cleaved SNAP-25 was calculated by densitometric analysis.

[0074] FIG. 27—Expressed/Purified CPNv-A-FXA-HT (Removable HIS-TAG)

[0075] Proteins were subjected to SDS-PAGE prior to staining with Coomassie Blue. The electrophoresis profile indicates purification of a disulphide-bonded di-chain species of the expected molecular mass of CPNv-A-FXa-HT. Lane 1=benchmark molecular mass markers; Lane 2=total E. coli protein soluble fraction; Lane 3=Factor Xa treated material prior to final capture on Ni²⁺-charged Sepharose; Lane 4=purified final material post activation with Factor Xa; Lane 5=purified final material post activation with Factor Xa+DTT.

[0076] FIG. 28—In Vitro Efficacy of LC/A-Nociceptin-H_{N}/A Fusion Proteins with Variable Spacer Length, as Assessed by Ligand Competition Assay

[0077] The ability of LC/A-nociceptin-H_{N}/A fusions of variable spacer length to bind to the ORL₁ receptor was assessed using a simple competition-based assay. Primary cultures of dorsal root ganglia (DRG) were exposed to varying concentrations of test material in the presence of 1 nM [³H]-nociceptin. The reduction in specific binding of the radiolabelled ligand was assessed by scintillation counting, and plotted in comparison to the efficacy of unlabelled ligand (Tocris nociceptin). The upper panel illustrates the displacement characteristics of the GS0, GS20, GS30 and Hx27 spacers, whilst the lower panel illustrates the displacement achieved by the GS10, GS15 and GS25 spaced fusion proteins. It is concluded that the GS0 and GS30 spacers are ineffective, and the GS10 is poorly effective, at displacing nociceptin from the ORL1 receptor.

[0078] FIG. 29—In Vitro Efficacy of LC/A-Nociceptin-H_{N}/A Fusion Proteins with Variable Spacer Length, as Assessed by In Vitro SNAP-25 Cleavage

[0079] Primary cultures of dorsal root ganglia (DRG) were exposed to varying concentrations of CPN-A (of variable spacer length) for 24 hours. Cellular proteins were separated by SDS-PAGE, Western blotted, and probed with anti-SNAP-25 to facilitate an assessment of SNAP-25 cleavage. The percentage of cleaved SNAP-25 was calculated by densitometric analysis. The poorly effective binding characteristics of the GS10 spaced fusion protein (see FIG. 28) are reflected in the higher concentrations of fusion required to achieve cleavage of intracellular SNAP-25. GS0 and GS30 spaced fusion proteins were completely ineffective (date not shown). GS15, 20 and 25 spaced fusion proteins were similarly effective.

[0080] FIG. 30—Cleavage of Snare Protein by Dynorphin Conjugates in Embryonic Spinal Cord Neurons (Escns)

[0081] Embryonic spinal cord neurons were exposed to varying concentrations of dynorphin conjugates of the present invention for 24 hours. Cellular proteins were separated by SDS-PAGE, Western blotted, and probed with anti-SNAP-25 to facilitate an assessment of SNAP-25 cleavage. The percentage of cleaved SNAP-25 was calculated by densitometric analysis. It is clear that LC/A-dynorphin-H_{N}/A fusion is more potent than an unliganded LC/A-H_{N}/A control molecule. The concentration of LC/A-dynorphin-H_{N}/A fusion required to achieve 50% maximal SNAP-25 cleavage is estimated to be 35.3 nM and the concentration for the LC/A-H_{N}/A control required to achieve 50% maximal SNAP-25 cleavage could not be determined due to its low potency.

[0082] FIG. 31—Cleavage of Snare Protein by Dynorphin Fusion Proteins in Chinese Hamster Ovary Cells (CHO-K1 Cells) Transfected with OP2 Receptor and SNAP-25

[0083] Chinese hamster ovary (CHO) cells were transfected so that they express the OP₂ receptor. Said cells were further transfected to express a SNARE protein (SNAP-25). The transfected cells were exposed to varying concentrations of different dynorphin conjugates for 24 hours. Cellular proteins were separated by SDS-PAGE, Western blotted, and probed with anti-SNAP-25 to facilitate an assessment of SNAP-25 cleavage. The percentage of cleaved SNAP-25 was calculated by densitometric analysis. It is clear that the dynorphin fusion proteins are more potent than the unliganded control molecule (labelled as LC/A-H_{N}/A).

[0084] FIG. 32—Cleavage of Snare Protein by Dynorphin Fusion Proteins in Embryonic Spinal Cord Neurons (Escns)

[0085] Embryonic spinal cord neurons were exposed to varying concentrations of dynorphin fusion proteins of the present invention for 24 hours. Cellular proteins were separated by SDS-PAGE, Western blotted, and probed with anti-SNAP-25 to facilitate an assessment of SNAP-25 cleavage. The percentage of cleaved SNAP-25 was calculated by densitometric analysis. It is clear that the dynorphin fusion proteins are more potent than the unliganded control molecule (labelled as LC/A-H_{N}/A).

[0086] FIG. 33—Kappa Receptor Activation Studies with a Range of Dynorphin Fusion Proteins

[0087] Chinese hamster ovary (CHO) cells were transfected so that they express the OP₂ receptor and SNAP-25. Said cells were used to measure cAMP deletion that occurs when the receptor is activated with a dynorphin ligand, using a FRET-based cAMP kit (LANCE® kit from Perkin Elmer). The transfected cells were exposed to varying concentrations of dynorphin fusion proteins of the present invention for 2 hours. cAMP levels were then detected by addition of a detection mix containing a fluorescently labelled cAMP tracer (Europium-streptavidin/biotin-cAMP) and fluorescently (Alexa) labelled anti-cAMP antibody and incubating at room temperature for 24 hours. Then samples are excited at 320 nM and emitted light measured at 665 nM to determine cAMP levels. It is clear that dynorphin fusion proteins are more potent than the unliganded control molecule (labelled as LC/A-H_{N}/A).

[0088] FIG. 34—Kappa Receptor Activation Studies with a Range of Dynorphin Fusion Proteins

[0089] Chinese hamster ovary (CHO) cells were transfected so that they express the OP₂ receptor (purchased from Perkin Elmer). Said cells were transfected so they express SNAP-25 and used to measure cAMP deletion that occurs when the receptor is activated with a dynorphin ligand, using a FRET-based cAMP kit (LANCE® kit from Perkin Elmer). The transfected cells were exposed to varying concentrations of dynorphin fusion proteins of the present invention for 2 hours. cAMP levels were then detected by addition of a detection mix containing a fluorescently labelled cAMP tracer (Europium-streptavadi/biotin-cAMP) and fluorescently (Alexa) labelled anti-cAMP antibody and incubating at room temperature for 24 hours. Then samples are excited at 320 nM and emitted light measured at 665 nM to determine cAMP levels. It is clear from the figure by the reduction in maximum cAMP that the OP2 receptor is activated by LC/A-CPDY-H_{N}/A (labelled as CPDY/A), LC/B-CPDY-H_{N}/B (labelled as CPDY/B), LC/C-CPDY-H_{N}/C (labelled as CPDY/C), and LC/D-CPDY-H_{N}/D (labelled as CPDY/D). The concentration required to achieve 50% reduction in cAMP with LC/A-CPDY-H_{N}/A, LC/B-CPDY-H_{N}/B, LC/C-CPDY-H_{N}/C (labelled as CPDY/, and LC/D-CPDY-H_{N}/D is 10.47 nM, 14.79 nM, 14.79 nM and 23.99 nM, respectively. Dynorphin peptide containing amino acids 1-17 of dynorphin A (labelled as dynorphin (1-17) was more potent than the fusions; 0.15 nM concentration required to achieve 50% reduction of cAMP.

[0090] FIG. 35—MrgX1 Receptor Activation Studies with Bam Fusion Proteins

[0091] The ability of BAM fusion proteins of the invention to activate the MrgX1 receptor in CHO cells was evaluated by measurement of the potency (pEC₅₀) and intrinsic efficacy (Emax) of ligands at the human MrgX1 receptor. Receptor activation by an agonist causes Gα_{q} protein activation resulting in Ca²⁺ release from intracellular stores that is mediated by the target enzyme phospholipase Cβ. The transient increase in intracellular Ca²⁺ was measured with a FlexStation3® microplate reader with integrated fluid transfer. CHO cells that express the recombinant human MrgX1 receptor were incubated with the a FLIPR-Calcium-4 masking dye and this Ca²⁺-4 dye formed a complex with Ca²⁺ which fluoresces at 525 nm following excitation at 485 nm allowing signal-detection. An inhibitor of cell membrane anion exchanger, probenecid, was included in the assay buffer to prevent outward transport or sequestration of dye molecules. Following incubation with the dye, the cell plate was loaded onto to the FlexStation3® which transfers BAM fusion proteins (or reference agonist BAMS-22) from a source plate into the microplate wells containing cells. The FlexStation 3® measured the fluorescent-emission from the Calcium-4 dye and readouts were formed as calcium traces displaying the magnitude of calcium flux as a result of MrgX1 receptor activation. The data demonstrated the activation of the MrgX1 receptor by BAM fusion proteins of the invention.

[0092] FIG. 36—Bam Fusion Protein Efficacy in Capsaicin-Induced Thermal Hyperalgesia Assay

[0093] The ability of different BAM fusion proteins of the invention to inhibit capsaicin-induced thermal hyperalgesia was evaluated. Intraplantar pretreatment of fusion proteins into Sprague-Dawley rats and 24 hours later 0.3% capsaicin was injected and rats were put on 25 C glass plate (rats contained in acrylic boxes, on 25° C. glass plate). Light beam (adjustable light Intensity) focused on the hind paw. Sensors detected movement of paw, stopping timer. Paw Withdrawal Latency is the time needed to remove the paw from the heat source (Cut-off of 20.48 seconds). A reduction/inhibition of the paw withdrawal latency indicates that the test substance demonstrates an antinociceptive effect. The data demonstrated the antinociceptive effect of the BAM fusion proteins of the present invention.

[0094] FIG. 37—Fusion Protein Efficacy in Capsaicin-Induced Thermal Hyperalgesia Assay

[0095] The ability of different fusion proteins of the invention to inhibit capsaicin-induced thermal hyperalgesia was evaluated. Intraplantar pretreatment of fusion proteins into Sprague-Dawley rats and 24 hours later 0.3% capsaicin was injected and rats were put on 25° C. glass plate (rats contained in acrylic boxes, on 25° C. glass plate). Light beam (adjustable light Intensity) focused on the hind paw. Sensors detected movement of paw, stopping timer. Paw Withdrawal Latency is the time needed to remove the paw from the heat source (Cut-off of 20.48 seconds). A reduction/inhibition of the paw withdrawal latency indicates that the test substance demonstrates an antinociceptive effect. The data demonstrated the antinociceptive effect of the fusion proteins of the present invention.

[0096] FIG. 38—Mu-Opioid Receptor (OPRM1) Binding Assay with β-Endorphin Fusion Proteins

[0097] Chinese hamster ovary (CHO) cells were stably transfected with the human mu-opioid receptors (CHO-K1-OPRM1) and used in a radioligand competition binding assay using [³H]-DAMGO. The data demonstrated that the β-endorphin fusion proteins of the present invention having different serotype backbones (i.e., A, B and D) demonstrated a concentration-dependent and almost complete inhibition of the specific binding of [³H]-DAMGO to the human mu-opioid receptors.

[0098] FIG. 39—Cleavage of Snare Protein by B-Endorphin Fusion Proteins in Human Small Cell Lung Carcinoma Cell Line NCI-H69

[0099] A SNAP-25 cleavage assay was developed using the human small cell lung carcinoma cell line NCI-H69 expressing endogenous opioid receptors and the activity of β-endorphin fusion proteins was assessed. The data demonstrated efficacy of the β-endorphin fusion protein in SNARE cleavage. Maximum SNAP-25 cleavage achieved by CPBE fusion protein was 23% (ED₅₀ 38 nm).

[0100] FIG. 40—β-Endorphin Fusion Protein Efficacy in Capsaicin-Induced Paw Guarding Assay

[0101] The nociceptive flexion reflex (also known as paw guarding assay) is a rapid withdrawal movement that constitutes a protective mechanism against possible limb damage. It can be quantified by assessment of electromyography (EMG) response in anesthetized rat as a result of low dose capsaicin, electrical stimulation or the capsaicin-sensitized electrical response. Intraplantar pretreatment (24 hour) of test substance into 300-380 g male Sprague-Dawley rats. Induction of paw guarding in defined method is achieved by 0.006% capsaicin, 10 μl in PBS (7.5% DMSO), injected in 10 seconds. This produces a robust reflex response from biceps feroris muscle. A reduction/inhibition of the nociceptive flexion reflex indicates that the test substance demonstrates an antinociceptive effect. The paw guarding assay data demonstrated the antinociceptive effect of the β-endorphin fusion proteins of the present invention.

[0102] FIG. 41—β-Endorphin Fusion Protein Efficacy in Capsaicin-Induced Thermal Hyperalgesia Assay

[0103] The ability of different β-endorphin fusion proteins of the invention to inhibit capsaicin-induced thermal hyperalgesia was evaluated. Intraplantar pretreatment of fusion proteins into Sprague-Dawley rats and 24 hours later 0.3% capsaicin was injected and rats were put on 25° C. glass plate (rats contained in acrylic boxes, on 25° C. glass plate). Light beam (adjustable light Intensity) focused on the hind paw. Sensors detected movement of paw, stopping timer. Paw Withdrawal Latency is the time needed to remove the paw from the heat source (Cut-off of 20.48 seconds). A reduction/inhibition of the paw withdrawal latency indicates that the test substance demonstrates an antinociceptive effect. The data demonstrated the antinociceptive effect of the β-endorphin fusion proteins of the present invention.

[0104] FIG. 42—B₂ Receptor Activation Studies with Bradykinin Fusion Proteins

[0105] Chinese hamster ovary (CHO) cells were stably transfected with the B₂ receptor and used in a calcium fluorimetry assay measuring intracellular calcium levels. The assay allowed the measurement of the potency (pEC₅₀) and intrinsic efficacy (Eₘₐₓ) of the bradykinin fusion protein. The data demonstrated that the bradykinin fusion protein activated the B₂ receptor and produced a dose dependent increase in intracellular calcium.

[0106] FIG. 43—Bradykinin Fusion Protein Efficacy in Capsaicin-Induced Paw Guarding

[0107] The paw guarding assay data (conducted as described above for FIG. 40) demonstrated the antinociceptive effect of the bradykinin fusion proteins of the present invention.

[0108] FIG. 44—Bradykinin Fusion Protein Efficacy in Capsaicin-Induced Thermal Hyperalgesia Assay

[0109] The thermal hyperalgesia assay data demonstrated (conducted as described above for FIG. 41) the antinociceptive effect of the bradykinin fusion proteins of the present invention.

[0110] FIG. 45—B₂ Receptor Activation Studies with DES-ARG⁹-Bradykinin Fusion Proteins

[0111] Chinese hamster ovary (CHO) cells were stably transfected with the B₁ receptor and used in a calcium fluorimetry assay measuring intracellular calcium levels. The assay allowed the measurement of the potency (pEC₅₀) and intrinsic efficacy (Eₘₐₓ) of fusion proteins having the des-Arg⁹-BK ligand. The data demonstrated that the des-Arg⁹-BK fusion protein activated the B₁ receptor and produced a dose dependent increase in intracellular calcium.

### DETAILED DESCRIPTION

[0112] The use of an “agonist”, which would normally stimulate a biological process, particularly exocytosis (for example, an increase in cellular secretion, or an up-regulation in membrane protein expression), is an exciting development in the technical field of re-targeted toxins. Furthermore, it is particularly surprising that an agonist may be employed in a therapeutic composition to achieve a reduction or inhibition of a biological process that the agonist would normally stimulate.

[0113] The fusion proteins of the present invention represent a distinct sub-set of toxin conjugates. In more detail, the fusion proteins of the present invention comprise TMs that have been selected on the basis of specific properties rather than on the simple basis that they have a corresponding receptor on a pain-sensing target cell of interest.

[0114] The non-cytotoxic protease component of the present invention is a non-cytotoxic protease, or a fragment thereof, which protease or protease fragment is capable of cleaving different but specific peptide bonds in one of three substrate proteins, namely synaptobrevin, syntaxin or SNAP-25, of the exocytic fusion apparatus in a nociceptive sensory afferent. These substrates are important components of the neurosecretory machinery. The non-cytotoxic protease component of the present invention is preferably a neisserial IgA protease or a fragment thereof or a clostridial neurotoxin L-chain or a fragment thereof. A particularly preferred non-cytotoxic protease component is a botulinum neurotoxin (BoNT) L-chain or a fragment thereof.

[0115] The translocation component of the present invention enables translocation of the non-cytotoxic protease (or fragment thereof) into the target cell such that functional expression of protease activity occurs within the cytosol of the target cell. The translocation component is preferably capable of forming ion-permeable pores in lipid membranes under conditions of low pH. Preferably it has been found to use only those portions of the protein molecule capable of pore-formation within the endosomal membrane. The translocation component may be obtained from a microbial protein source, in particular from a bacterial or viral protein source. Hence, in one embodiment, the translocation component is a translocating domain of an enzyme, such as a bacterial toxin or viral protein. The translocation component of the present invention is preferably a clostridial neurotoxin H-chain or a fragment thereof. Most preferably it is the H_{N} domain (or a functional component thereof), wherein H_{N} means a portion or fragment of the H-chain of a clostridial neurotoxin approximately equivalent to the amino-terminal half of the H-chain, or the domain corresponding to that fragment in the intact H-chain.

[0116] The TM component of the present invention is responsible for binding the fusion protein of the present invention to a Binding Site on a target cell. Thus, the TM component is simply a ligand through which a fusion protein of the present invention binds to a selected target cell.

[0117] In the context of the present invention, the target cell is a nociceptive sensory afferent, preferably a primary nociceptive afferent (e.g., an A-fibre such as an Aδ-fibre or a C-fibre). Thus, the fusion proteins of the present invention are capable of inhibiting neurotransmitter or neuromodulator (e.g., glutamate, substance P, calcitonin-gene related peptide (CGRP), and/or neuropeptide Y) release from discrete populations of nociceptive sensory afferent neurons. In use, the fusion proteins reduce or prevent the transmission of sensory afferent signals (e.g., neurotransmitters or neuromodulators) from peripheral to central pain fibres, and therefore have application as therapeutic molecules for the treatment of pain, in particular chronic pain.

[0118] It is routine to confirm that a TM binds to a nociceptive sensory afferent. For example, a simple radioactive displacement experiment may be employed in which tissue or cells representative of the nociceptive sensory afferent (for example DRGs) are exposed to labelled (e.g., tritiated) ligand in the presence of an excess of unlabelled ligand. In such an experiment, the relative proportions of non-specific and specific binding may be assessed, thereby allowing confirmation that the ligand binds to the nociceptive sensory afferent target cell. Optionally, the assay may include one or more binding antagonists, and the assay may further comprise observing a loss of ligand binding. Examples of this type of experiment can be found in Hulme, E. C. (1990), Receptor-binding studies, a brief outline, pp. 303-311, in Receptor Biochemistry, A Practical Approach, Ed. E. C. Hulme, Oxford University Press.

[0119] The fusion proteins of the present invention generally demonstrate a reduced binding affinity (in the region of up to 100-fold) for nociceptive sensory afferent target cells when compared with the corresponding ‘free’ TM. However, despite this observation, the fusion proteins of the present invention surprisingly demonstrate good efficacy. This can be attributed to two principal features. First, the non-cytotoxic protease component is catalytic—thus, the therapeutic effect of a few such molecules is rapidly amplified. Secondly, the receptors present on the nociceptive sensory afferents need only act as a gateway for entry of the therapeutic, and need not necessarily be stimulated to a level required in order to achieve a ligand-receptor mediated pharmacological response. Accordingly, the fusion proteins of the present invention may be administered at a dosage that is much lower that would be employed for other types of analgesic molecules such as NSAIDS, morphine, and gabapentin. The latter molecules are typically administered at high microgram to milligram (even up to hundreds of milligram) quantities, whereas the fusion proteins of the present invention may be administered at much lower dosages, typically at least 10-fold lower, and more typically at 100-fold lower.

[0120] The TM preferably comprises a maximum of 50 amino acid residues, more preferably a maximum of 40 amino acid residues, particularly preferably a maximum of 30 amino acid residues, and most preferably a maximum of 20 amino acid residues.

[0121] Opioids represent a preferred group of TMs of the present invention. Within this family of peptides is included enkephalins (met and leu), endomorphins 1 and 2, β-endorphin and dynorphin. Opioid peptides are frequently used in the clinic to modify the activity to nociceptors, and other cells involved in the pain response. As exemplified by the three-step World Health Organisation Analgesic Ladder, opioids have entry points into the pharmacological treatment of chronic cancer and non-cancer pain at all three stages, underlining their importance to the treatment of pain. Reference to opioids embraces fragments, variants and derivatives thereof, which retain the ability to bind to nociceptive sensory afferents.

[0122] The TM of the invention can also be a molecule that acts as an “agonist” at one or more of the receptors present on a nociceptive sensory afferent, more particularly on a primary nociceptive afferent. Conventionally, an agonist has been considered any molecule that can either increase or decrease activities within a cell, namely any molecule that simply causes an alteration of cell activity. For example, the conventional meaning of an agonist would include a chemical substance capable of combining with a receptor on a cell and initiating a reaction or activity, or a drug that induces an active response by activating receptors, whether the response is an increase or decrease in cellular activity.

[0123] However, for the purposes of this invention, an agonist is more specifically defined as a molecule that is capable of stimulating the process of exocytic fusion in a target cell, which process is susceptible to inhibition by a protease (or fragment thereof) capable of cleaving a protein of the exocytic fusion apparatus in said target cell.

[0124] Accordingly, the particular agonist definition of the present invention would exclude many molecules that would be conventionally considered as agonists. For example, nerve growth factor (NGF) is an agonist in respect of its ability to promote neuronal differentiation via binding to a TrkA receptor. However, NGF is not an agonist when assessed by the above criteria because it is not a principal inducer of exocytic fusion. In addition, the process that NGF stimulates (i.e., cell differentiation) is not susceptible to inhibition by the protease activity of a non-cytotoxic toxin molecule.

[0125] In one embodiment, the fusion proteins according to the present invention demonstrate preferential receptor binding and/or internalisation properties. This, in turn, may result in more efficient delivery of the protease component to a pain-sensing target cell.

[0126] Use of an agonist as a TM is self-limiting with respect to side-effects. In more detail, binding of an agonist TM to a pain-sensing target cell increases exocytic fusion, which may exacerbate the sensation of pain. However, the exocytic process that is stimulated by agonist binding is subsequently reduced or inhibited by the protease component of the fusion protein.

[0127] The agonist properties of a TM that binds to a receptor on a nociceptive afferent can be confirmed using the methods described in Example 10.

[0128] In one embodiment of the invention, the target for the TM is the ORL₁ receptor. This receptor is a member of the G-protein-coupled class of receptors, and has a seven transmembrane domain structure. The properties of the ORL₁ receptor are discussed in detail in Mogil & Pasternak (2001), Pharmacological Reviews, 53(3):381-415.

[0129] In one embodiment, the TM is a molecule that binds (preferably that specifically binds) to the ORL₁ receptor. More preferably, the TM is an “agonist” of the ORL₁ receptor. The term “agonist” in this context is defined as above.

[0130] The agonist properties of a TM that binds to an ORL₁ receptor can be confirmed using the methods described in Example 10. These methods are based on previous experiments (see Inoue et al. 1998 (Proc. Natl. Acad. Sci., 95:10949-10953)), which confirm that the natural agonist of the ORL₁ receptor, nociceptin, causes the induction of substance P release from nociceptive primary afferent neurons. This is supported by the fact that:
[0131] the nociceptin-induced responses are abolished by specific NK1 receptor (the substance P receptor) antagonists; and
[0132] pre-treatment of the cells with capsaicin (which depletes substance P from small diameter primary afferent neurons) attenuates the nociceptin-induced responses.

[0133] Similarly, Inoue et al. confirm that an intraplantar injection of botulinum neurotoxin type A abolishes the nociceptin-induced responses. Since it is known that BoNT inhibits the release of substance P from primary afferent neurons (Welch et al., 2000, Toxicon, 38:245-258), this confirms the link between nociceptin-ORL₁ interaction and subsequent release of substance P.

[0134] Thus, a TM can be said to have agonist activity at the ORL₁ receptor if the TM causes an induction in the release of substance P from a nociceptive sensory afferent neuron (see Example 10).

[0135] In a particularly preferred embodiment of the invention, the TM is nociceptin—the natural ligand for the ORL₁ receptor. Nociceptin targets the ORL₁ receptor with high affinity. Examples of other preferred TMs include:

| | | | SEQ ID |
|---|---|---|---|
| Code | Sequence | Ref. | NO:. |
| Nociceptin 1-17 | FGGFTGARKSARKLANQ | 1 | 37, 38 |
| Nociceptin 1-11 | FGGFTGARKSA | 1 | 39, 40 |
| Nociceptin [Y10] 1-11 | FGGFTGARKYA | 1 | 41, 42 |
| Nociceptin [Y11] 1-11 | FGGFTGARKSY | 1 | 43, 44 |
| Nociceptin [Y14] 1-17 | FGGFTGARKSARKYANQ | 1 | 45, 46 |
| Nociceptin 1-13 | FGGFTGARKSARK | 2 | 47, 48 |
| Nociceptin [R14K15] 1-17 | FGGFTGARKSARKRKNQ | 3, 4 | 49, 50 |
| (also known in this | | | |
| specification as “variant” | | | |
| nociceptin) | | | |
| Peptide agonist | Peptide agonists from | 5 | — |
| | combinatorial library | | |
| | approach | | |

1 Mogil & Pasternak, 2001, Pharmacol. Rev., 53:381-415
2 Maile et al., 2003, Neurosci. Lett., 350:190-192
3 Rizzi et al., 2002, J. Pharmacol. Exp. Therap., 300:57-63
4 Okada et al., 2000, Biochem. Biophys. Res. Commun., 278:493-498
5 Dooley et al., 1997, J. Pharmacol. Exp. Ther. 283(2):735-41.

[0136] The above-identified “variant” TM demonstrates particularly good binding affinity (when compared with natural nociceptin) for nociceptive sensory afferents. This is surprising as the amino acid modifications occur at a position away from the N-terminus of the TM. Moreover, the modifications are almost at the C-terminus of the TM, which in turn is attached to a large polypeptide sequence (i.e., the translocation domain). Generally speaking, a TM-containing fusion protein will demonstrate an approximate 100-fold reduction in binding ability vis-à-vis the TM per se. The above-mentioned “variant” TM per se demonstrates an approximate 3- to 10-fold increase in binding ability for a nociceptive sensory afferent (e.g., via the ORL₁ receptor) vis-à-vis natural nociceptin. Thus, a “variant” TM-containing fusion might be expected to demonstrate an approximate 10-fold reduction in binding ability for a nociceptive sensory afferent (e.g., via the ORL₁ receptor) vis-à-vis ‘free’ nociceptin. However, the present inventors have demonstrated that such “variant” TM-containing fusion proteins demonstrate a binding ability that (most surprisingly) closely mirrors that of ‘free’ nociceptin—see FIG. 14.

[0137] In the context of the present invention, the term opioid or an agonist of the ORL₁ receptor (such as nociceptin, or any one of the peptides listed in the table above) embraces molecules having at least 70%, preferably at least 80%, more preferably at least 90%, and most preferably at least 95% amino acid sequence acid identity/homology with said opioid or agonist. The agonist homologues retain the agonist properties of nociceptin at the ORL₁ receptor, which may be tested using the methods provided in Example 10. Similarly, an opioid homologue substantially retains the binding function of the opioid with which it shows high amino acid sequence identity/homology.

[0138] The invention also encompasses fragments, variants, and derivatives of any one of the TMs described herein. These fragments, variants, and derivatives substantially retain the properties that are ascribed to said TMs.

[0139] In addition to the above-mentioned opioid and non-opioid classes of TMs, a variety of other polypeptides are suitable for targeting the fusion proteins of the present invention to nociceptive sensory afferents (e.g., to nociceptors). In this regard, particular reference is made to galanin and derivatives of galanin. Galanin receptors are found pre- and post-synaptically in DRGs (Liu & Hokfelt, (2002), Trends Pharm. Sci., 23(10):468-74), and are enhanced in expression during neuropathic pain states. Proteinase-activated receptors (PARs) are also a preferred group of TMs of the present invention, most particularly PAR-2. It is known that agonists of PAR-2 induce/elicit acute inflammation, in part via a neurogenic mechanism. PAR2 is expressed by primary spinal afferent neurons, and PAR2 agonists stimulate release of substance P(SP) and calcitonin gene-related peptide (CGRP) in peripheral tissues. Another preferred group of TMs of the present invention include bovine adrenal medullary (BAM) peptides, bradykinin and/or substance P.

[0140] Another particularly preferred set of TMs of the present invention includes:

| Ligand | Reference |
|---|---|
| Nociceptin | Guerrini, et al., (1997) J. Med. Chem., 40: 1789-1793 |
| β-endorphin | Blanc, et al., (1983) J. Biol. Chem., 258(13): |
| | 8277-8284 |
| Endomorphin-1; | Zadina, et al., (1997). Nature, 386: 499-502 |
| Endomorphin-2 | |
| Dynorphin | Fields & Basbaum (2002) Chapter 11, In The |
| | Textbook of Pain, Wall & Melzack eds. |
| Met-enkephalin | Fields & Basbaum (2002) Chapter 11, In The |
| | Textbook of Pain, Wall & Melzack eds. |
| Leu-enkephalin | Fields & Basbaum (2002) Chapter 11, In The |
| | Textbook of Pain, Wall & Melzack eds. |
| Galanin | Xu et al., (2000) Neuropeptides, 34(3&4): 137-147 |
| PAR-2 peptide | Vergnolle et al., (2001) Nat. Med., 7(7): 821-826 |

[0141] In a preferred embodiment of the invention, the target for the TM is selected from the group consisting of: Mrg receptors such as MrgX1, opioid receptors such as OPRD1 and/or OPRM1, BDKRB1 and/or BDKRB2, Tachykinin receptors such as TACR1, TACR2 and/or TACR3, Kappa receptor (OPRK1) and/or ORL₁ receptor.

[0142] In one embodiment, the TM is a molecule that binds (preferably that specifically binds) to one or more of the above-mentioned receptors. For example, the TM is an “agonist” of one or more of the above-mentioned receptors. The term “agonist” in this context is defined as above.

[0143] In one embodiment, the TM comprises or consists of a BAM peptide. Full-length BAM is a 22 amino acid peptide, abbreviated herein as BAM1-22 (represented by SEQ ID NO:108). In one embodiment, the BAM TM of the invention comprises or consists of a 15 amino acid fragment of full-length BAM peptide and is referred to herein as BAM8-22 (represented by SEQ ID NO:109). In one embodiment, said BAM peptides bind (preferably specifically bind) to Mrg receptors such as MrgX1.

[0144] In one embodiment, the TM comprises or consists of a β-endorphin peptide. β-endorphin is a 31 amino acid peptide (represented by SEQ ID NO:114). In one embodiment, said β-endorphin peptide binds (preferably specifically binds) opioid receptors such as OPRD1 and/or OPRM1.

[0145] In one embodiment, the TM comprises or consists of a bradykinin peptide. bradykinin is a 9 amino acid peptide (represented by SEQ ID NO:117). In one embodiment, said bradykinin peptide binds (preferably specifically binds) bradykinin target receptors BDKRB1 and/or BDKRB2.

[0146] In one embodiment, the TM comprises or consists of a des-Arg⁹-BK ligand (represented by SEQ ID NO:118). The des-Arg⁹-Bradykinin ligand differs from bradykinin ligand by the removal of an arginine residue from the C-terminus. In one embodiment, said des-Arg⁹-BK ligand binds (preferably specifically binds) bradykinin target receptors BDKRB1 and/or BDKRB2.

[0147] In one embodiment, the TM comprises or consists of a substance P peptide. Full length substance P is an 11 amino acid peptide (represented by SEQ ID NO:122). In one embodiment, the TM comprises or consists of a substance P analogue, such as the analogue referred to herein as ‘S6’ (represented by SEQ ID NO:123). In one embodiment, said substance P peptide, or analogue thereof binds (preferably specifically binds) to Tachykinin receptors such as TACR1, TACR2 and/or TACR3.

[0148] In one embodiment, the TM comprises or consists of a dynorphin peptide. The sequence of dynorphin is represented by SEQ ID NO:89. In one embodiment, said dynorphin peptide binds (preferably specifically binds) Kappa receptor (OPRK1).

[0149] The invention also encompasses fragments, variants, and derivatives and analogues of the above-mentioned TMs. These fragments, variants, and derivatives and analogues substantially retain the properties that are ascribed to said TM. For example, the fragments, variants, and derivatives may retain the ability to bind to one their respective receptor(s). By way of example, reference is made to the above-mentioned BAM8-22 fragment of the full length BAM1-22 TM as well as the substance P analogue S6.

[0150] In one embodiment, the TM comprises or consists of an amino acid sequence having at least 70%, preferably at least 80% (such as at least 82, 84, 85, 86, 88 or 89%), more preferably at least 90% (such as at least 91, 92, 93 or 94%), and most preferably at least 95% (such as at least 96, 97, 98, 99 or 100%) amino acid sequence acid identity to SEQ ID NOs:38, 40, 42, 44, 46, 48, 50, 89, 108, 109, 114, 117, 118, 122, and/or 123.

[0151] In one embodiment, the TM comprises or consists of an amino acid sequence having at least 70%, preferably at least 80% (such as at least 82, 84, 85, 86, 88 or 89%), more preferably at least 90% (such as at least 91, 92, 93 or 94%), and most preferably at least 95% (such as at least 96, 97, 98, 99 or 100%) amino acid sequence acid identity to SEQ ID NOs:108, 109, 114, 117, 118, 122 and/or 123.

[0152] In one embodiment, the Targeting Moiety comprises or consists of an amino acid sequence according to SEQ ID NO:38, 89, 108, 114, 117, 118, 122 and/or 123 or a fragment comprising or consisting of at least 16 (such as at least 5, 6, 7, 8, 9, 10, 11, 12, 13, 14 or 15) contiguous amino acid residues thereof, or a variant amino acid sequence of said SEQ ID NO:38, 89, 108, 114, 117, 118, 122 and/or 123 or said fragment having a maximum of 6 (such as a maximum of 5, 4, 3, 2 or 1) conservative amino acid substitutions.

[0153] The protease cleavage site of the present invention allows cleavage (preferably controlled cleavage) of the fusion protein at a position between the non-cytotoxic protease component and the TM component. It is this cleavage reaction that converts the fusion protein from a single chain polypeptide into a disulphide-linked, di-chain polypeptide.

[0154] According to a preferred embodiment of the present invention, the TM binds via a domain or amino acid sequence that is located away from the C-terminus of the TM. For example, the relevant binding domain may include an intra domain or an amino acid sequence located towards the middle (i.e., of the linear peptide sequence) of the TM. Preferably, the relevant binding domain is located towards the N-terminus of the TM, more preferably at or near to the N-terminus.

[0155] In one embodiment, the single chain polypeptide fusion may include more than one proteolytic cleavage site. However, where two or more such sites exist, they are different, thereby substantially preventing the occurrence of multiple cleavage events in the presence of a single protease. In another embodiment, it is preferred that the single chain polypeptide fusion has a single protease cleavage site.

[0156] The protease cleavage sequence(s) may be introduced (and/or any inherent cleavage sequence removed) at the DNA level by conventional means, such as by site-directed mutagenesis. Screening to confirm the presence of cleavage sequences may be performed manually or with the assistance of computer software (e.g., the MapDraw program by DNASTAR, Inc.).

[0157] Whilst any protease cleavage site may be employed, the following are preferred:

| | |
|---|---|
| Enterokinase | (DDDDK↓) |
| Factor Xa | (IEGR↓/IDGR↓) |
| TEV(Tobacco Etch virus) | (ENLYFQ↓G) |
| Thrombin | (LVPR↓GS) |
| PreScission | (LEVLFQ↓GP) |

[0158] Also embraced by the term protease cleavage site is an intein, which is a self-cleaving sequence. The self-splicing reaction is controllable, for example by varying the concentration of reducing agent present.

[0159] In use, the protease cleavage site is cleaved and the N-terminal region (preferably the N-terminus) of the TM becomes exposed. The resulting polypeptide has a TM with an N-terminal domain or an intra domain that is substantially free from the remainder of the fusion protein. This arrangement ensures that the N-terminal component (or intra domain) of the TM may interact directly with a Binding Site on a target cell.

[0160] In a preferred embodiment, the TM and the protease cleavage site are distanced apart in the fusion protein by at most 10 amino acid residues, more preferably by at most 5 amino acid residues, and most preferably by zero amino acid residues. Thus, following cleavage of the protease cleavage site, a fusion is provided with a TM that has an N-terminal domain that is substantially free from the remainder of the fusion. This arrangement ensures that the N-terminal component of the Targeting Moiety may interact directly with a Binding Site on a target cell.

[0161] One advantage associated with the above-mentioned activation step is that the TM only becomes susceptible to N-terminal degradation once proteolytic cleavage of the fusion protein has occurred. In addition, the selection of a specific protease cleavage site permits selective activation of the polypeptide fusion into a di-chain conformation.

[0162] Construction of the single-chain polypeptide fusion of the present invention places the protease cleavage site between the TM and the non-cytotoxic protease component.

[0163] It is preferred that, in the single-chain fusion, the TM is located between the protease cleavage site and the translocation component. This ensures that the TM is attached to the translocation domain (i.e., as occurs with native clostridial holotoxin), though in the case of the present invention the order of the two components is reversed vis-à-vis native holotoxin. A further advantage with this arrangement is that the TM is located in an exposed loop region of the fusion protein, which has minimal structural effects on the conformation of the fusion protein. In this regard, said loop is variously referred to as the linker, the activation loop, the inter-domain linker, or just the surface exposed loop (Schiavo et al., 2000, Phys. Rev., 80:717-766; Turton et al., 2002, Trends Biochem. Sci., 27:552-558).

[0164] In another embodiment of the present invention, the TM is either N- or C-terminally located with respect to the fusion protein. In other words, in one embodiment the TM is not located between the non-cytotoxic protease and translocation domain components of the single-chain polypeptide fusion protein.

[0165] In one embodiment, the invention provides a single-chain polypeptide fusion protein comprising (or consisting of) an amino acid sequence having at least 80% (such as at least 85, 90, 92, 94, 95, 96, 97, 98, 99 or 100%) sequence identity to the amino acid sequence of SEQ ID NOs:24, 98, 99, 100, 101, 102, 103, 104, 105, 106, 107, 111, 112, 113, 115, 116, 120, 121, 124, 125, 126, 129, 130, 131, 132, 133, 134, 135, 136, 137, 138, 139, 140, 141, 142, 143, 144, 145, 146, 147, 148, 149, 150, 151, 152, 153, 154, 155, 156 and/or 157.

[0166] In one embodiment, the invention provides a single-chain polypeptide fusion protein comprising (or consisting of) an amino acid sequence having at least 80% (such as at least 85, 90, 92, 94, 95, 96, 97, 98, 99 or 100%) sequence identity to the amino acid sequence of SEQ ID NOs:98, 99, 100, 101, 102, 103, 104, 105, 106, 107, 129, 140, 141, 142, 143, 144, 145, 146, 147, 148, 149 and/or 150.

[0167] In one embodiment, the invention provides a single-chain polypeptide fusion protein comprising (or consisting of) an amino acid sequence having at least 80% (such as at least 85, 90, 92, 94, 95, 96, 97, 98, 99 or 100%) sequence identity to the amino acid sequence of SEQ ID NOs:111, 112, 113, 132, 133 and/or 134.

[0168] In one embodiment, the invention provides a single-chain polypeptide fusion protein comprising (or consisting of) an amino acid sequence having at least 80% (such as at least 85, 90, 92, 94, 95, 96, 97, 98, 99 or 100%) sequence identity to the amino acid sequence of SEQ ID NOs:23, 24, 115, 116, 135, 136, 137 and/or 138.

[0169] In one embodiment, the invention provides a single-chain polypeptide fusion protein comprising (or consisting of) an amino acid sequence having at least 80% (such as at least 85, 90, 92, 94, 95, 96, 97, 98, 99 or 100%) sequence identity to the amino acid sequence of SEQ ID NOs:120, 121 and/or 139.

[0170] In one embodiment, the invention provides a single-chain polypeptide fusion protein comprising (or consisting of) an amino acid sequence having at least 80% (such as at least 85, 90, 92, 94, 95, 96, 97, 98, 99 or 100%) sequence identity to the amino acid sequence of SEQ ID NO:124 and/or 157.

[0171] In one embodiment, the invention provides a single-chain polypeptide fusion protein comprising (or consisting of) an amino acid sequence having at least 80% (such as at least 85, 90, 92, 94, 95, 96, 97, 98, 99 or 100%) sequence identity to the amino acid sequence of SEQ ID NOs:125, 126, 130, 131, 151, 152, 153, 154, 155 and/or 156.

[0172] In one embodiment, in the single chain polypeptide, the non-cytotoxic protease component and the translocation component are linked together by a disulphide bond. Thus, following cleavage of the protease cleavage site, the polypeptide assumes a di-chain conformation, wherein the protease and translocation components remain linked together by the disulphide bond. To this end, it is preferred that the protease and translocation components are distanced apart from one another in the single chain fusion protein by a maximum of 100 amino acid residues, more preferably a maximum of 80 amino acid residues, particularly preferably by a maximum of 60 amino acid residues, and most preferably by a maximum of 50 amino acid residues.

[0173] In one embodiment, the non-cytotoxic protease component forms a disulphide bond with the translocation component of the fusion protein. For example, the amino acid residue of the protease component that forms the disulphide bond is located within the last 20, preferably within the last 10 C-terminal amino acid residues of the protease component. Similarly, the amino acid residue within the translocation component that forms the second part of the disulphide bond may be located within the first 20, preferably within the first 10 N-terminal amino acid residues of the translocation component.

[0174] Alternatively, in the single chain polypeptide, the non-cytotoxic protease component and the TM may be linked together by a disulphide bond. In this regard, the amino acid residue of the TM that forms the disulphide bond is preferably located away from the N-terminus of the TM, more preferably towards to C-terminus of the TM.

[0175] In one embodiment, the non-cytotoxic protease component forms a disulphide bond with the TM component of the fusion protein. In this regard, the amino acid residue of the protease component that forms the disulphide bond is preferably located within the last 20, more preferably within the last 10 C-terminal amino acid residues of the protease component. Similarly, the amino acid residue within the TM component that forms the second part of the disulphide bond is preferably located within the last 20, more preferably within the last 10 C-terminal amino acid residues of the TM.

[0176] The above disulphide bond arrangements have the advantage that the protease and translocation components are arranged in a manner similar to that for native clostridial neurotoxin. By way of comparison, referring to the primary amino acid sequence for native clostridial neurotoxin, the respective cysteine amino acid residues are distanced apart by between 8 and 27 amino acid residues—taken from Popoff, M R & Marvaud, J-C, 1999, Structural & genomic features of clostridial neurotoxins, Chapter 9, in The Comprehensive Sourcebook of Bacterial Protein Toxins. Ed. Alouf & Freer:

| | | ‘Native’ |
|---|---|---|
| | | length |
| Sero- | | between |
| type¹ | Sequence | C-C |
| BoNT/A1 | CVRGIITSKTKS----LDKGYNKALNDLC | 23 |
| BoNT/A2 | CVRGIIPFKTKS----LDEGYNKALNDLC | 23 |
| BoNT/B | CKSVKAPG-------------------IC | 8 |
| BoNT/C | CHKAIDGRS------------LYNKTLDC | 15 |
| BoNT/D | CLRLTK---------------NSRDDSTC | 12 |
| BoNT/E | CKN-IVSVK----------GIRK---SIC | 13 |
| BoNT/F | CKS-VIPRK----------GTKAPP-RLC | 15 |
| BoNT/G | CKPVMYKNT----------GKSE----QC | 13 |
| TeNT | CKKIIPPTNIRENLYNRTASLTDLGGELC | 27 |

¹Information from proteolytic strains only

[0177] The fusion protein may comprise one or more purification tags, which are located N-terminal to the protease component and/or C-terminal to the translocation component.

[0178] Whilst any purification tag may be employed, the following are preferred:
[0179] His-tag (e.g., 6× histidine), preferably as a C-terminal and/or N-terminal tag
[0180] MBP-tag (maltose binding protein), preferably as an N-terminal tag
[0181] GST-tag (glutathione-S-transferase), preferably as an N-terminal tag
[0182] His-MBP-tag, preferably as an N-terminal tag
[0183] GST-MBP-tag, preferably as an N-terminal tag
[0184] Thioredoxin-tag, preferably as an N-terminal tag
[0185] CBD-tag (Chitin Binding Domain), preferably as an N-terminal tag.

[0186] According to a further embodiment of the present invention, one or more peptide spacer molecules may be included in the fusion protein. For example, a peptide spacer may be employed between a purification tag and the rest of the fusion protein molecule (e.g., between an N-terminal purification tag and a protease component of the present invention; and/or between a C-terminal purification tag and a translocation component of the present invention). A peptide spacer may be also employed between the TM and translocation components of the present invention.

[0187] A variety of different spacer molecules may be employed in any of the fusion proteins of the present invention. Examples of such spacer molecules include those illustrated in FIGS. 28 and 29. Particular mention here is made to GS15, GS20, GS25, and Hx27—see FIGS. 28 and 29.

[0188] The present inventors have unexpectedly found that the fusion proteins (e.g., CPNv/A) of the present invention may demonstrate an improved binding activity for nociceptive sensory afferents when the size of the spacer is selected so that (in use) the C-terminus of the TM and the N-terminus of the translocation component are separated from one another by 40-105 angstroms, preferably by 50-100 angstroms, and more preferably by 50-90 angstroms. In another embodiment, the preferred spacers have an amino acid sequence of 11-29 amino acid residues, preferably 15-27 amino acid residues, and more preferably 20-27 amino acid residues. Suitable spacers may be routinely identified and obtained according to Crasto, C. J. and Feng, J. A., 2000, Protein Eng. 13(5): 309-312—see also http://www.fccc./edu/research/labs/feng/limker.html.

[0189] In accordance with a second aspect of the present invention, there is provided a DNA sequence that encodes the above-mentioned single chain polypeptide. In a preferred aspect of the present invention, the DNA sequence is prepared as part of a DNA vector, wherein the vector comprises a promoter and terminator.

[0190] In a preferred embodiment, the vector has a promoter selected from:

| Promoter | Induction Agent | Typical Induction Condition |
|---|---|---|
| Tac (hybrid) | IPTG | 0.2 mM (0.05-2.0 mM) |
| AraBAD | L-arabinose | 0.2% (0.002-0.4%) |
| T7-lac operator | IPTG | 0.2 mM (0.05-2.0 mM) |

[0191] The DNA construct of the present invention is preferably designed in silico, and then synthesised by conventional DNA synthesis techniques.

[0192] The above-mentioned DNA sequence information is optionally modified for codon-biasing according to the ultimate host cell (e.g., E. coli) expression system that is to be employed.

[0193] The DNA backbone is preferably screened for any inherent nucleic acid sequence, which when transcribed and translated would produce an amino acid sequence corresponding to the protease cleave site encoded by the second peptide-coding sequence. This screening may be performed manually or with the assistance of computer software (e.g., the MapDraw program by DNASTAR, Inc.).

[0194] According to a further embodiment of the present invention, there is provided a method of preparing a non-cytotoxic agent, comprising:
[0195] a. contacting a single-chain polypeptide fusion protein of the invention with a protease capable of cleaving the protease cleavage site;
[0196] b. cleaving the protease cleavage site, and thereby forming a di-chain fusion protein.

[0197] This aspect provides a di-chain polypeptide, which generally mimics the structure of clostridial holotoxin. In more detail, the resulting di-chain polypeptide typically has a structure wherein:
[0198] a. the first chain comprises the non-cytotoxic protease, or a fragment thereof, which protease or protease fragment is capable of cleaving a protein of the exocytic fusion apparatus of a nociceptive sensory afferent;
[0199] b. the second chain comprises the TM and the translocation domain that is capable of translocating the protease or protease fragment from within an endosome, across the endosomal membrane and into the cytosol of the nociceptive sensory afferent; and
   the first and second chains are disulphide linked together.

[0200] In use, the single chain or di-chain polypeptide of the invention treat, prevent or ameliorate pain.

[0201] In use, a therapeutically effective amount of a single chain or di-chain polypeptide of the invention is administered to a patient.

[0202] According to a further aspect of the present invention, there is provided use of a single chain or di-chain polypeptide of the invention, for the manufacture of a medicament for treating, preventing or ameliorating pain.

[0203] According to a related aspect, there is provided a method of treating, preventing or ameliorating pain in a subject, comprising administering to said patient a therapeutically effective amount of a single chain or di-chain polypeptide of the invention.

[0204] The compounds described here may be used to treat a patient suffering from one or more types of chronic pain including neuropathic pain, inflammatory pain, headache pain, somatic pain, visceral pain, and referred pain.

[0205] To “treat,” as used here, means to deal with medically. It includes, for example, administering a compound of the invention to prevent pain or to lessen its severity.

[0206] The term “pain,” as used here, means any unpleasant sensory experience, usually associated with a physical disorder. The physical disorder may or may not be apparent to a clinician. Pain is of two types: chronic and acute. An “acute pain” is a pain of short duration having a sudden onset. One type of acute pain, for example, is cutaneous pain felt on injury to the skin or other superficial tissues, such as caused by a cut or a burn. Cutaneous nociceptors terminate just below the skin, and due to the high concentration of nerve endings, produce a well-defined, localized pain of short duration. “Chronic pain” is a pain other than an acute pain. Chronic pain includes neuropathic pain, inflammatory pain, headache pain, somatic pain visceral pain and referred pain.

### I. Neuropathic Pain

[0207] The compounds of the invention may be used to treat pain caused by or otherwise associated with any of the following neuropathic pain conditions. “Neuropathic pain” means abnormal sensory input, resulting in discomfort, from the peripheral nervous system, central nervous systems, or both.

[0208] A. Symptoms of Neuropathic Pain

[0209] Symptoms of neuropathic pain can involve persistent, spontaneous pain, as well as allodynia (a painful response to a stimulus that normally is not painful), hyperalgesia (an accentuated response to a painful stimulus that usually causes only a mild discomfort, such as a pin prick), or hyperpathia (where a short discomfort becomes a prolonged severe pain).

[0210] B. Causes of Neuropathic Pain

[0211] Neuropathic pain may be caused by any of the following.

[0212] 1. A traumatic insult, such as, for example, a nerve compression injury (e.g., a nerve crush, a nerve stretch, a nerve entrapment or an incomplete nerve transsection); a spinal cord injury (e.g., a hemisection of the spinal cord); a limb amputation; a contusion; an inflammation (e.g., an inflammation of the spinal cord); or a surgical procedure.

[0213] 2. An ischemic event, including, for example, a stroke and heart attack.

[0214] 3. An infectious agent

[0215] 4. Exposure to a toxic agent, including, for example, a drug, an alcohol, a heavy metal (e.g., lead, arsenic, mercury), an industrial agent (e.g., a solvent, fumes from a glue) or nitrous oxide.

[0216] 5. A disease, including, for example, an inflammatory disorder, a neoplastic tumor, an acquired immune deficiency syndrome (AIDS), Lymes disease, a leprosy, a metabolic disease, a peripheral nerve disorder, like neuroma, a mononeuropathy or a polyneuropathy.

[0217] C. Types of Neuropathic Pain

[0218] 1. Neuralgia.

[0219] A neuralgia is a pain that radiates along the course of one or more specific nerves usually without any demonstrable pathological change in the nerve structure. The causes of neuralgia are varied. Chemical irritation, inflammation, trauma (including surgery), compression by nearby structures (for instance, tumors), and infections may all lead to neuralgia. In many cases, however, the cause is unknown or unidentifiable. Neuralgia is most common in elderly persons, but it may occur at any age. A neuralgia, includes, without limitation, a trigeminal neuralgia, a post-herpetic neuralgia, a postherpetic neuralgia, a glossopharyngeal neuralgia, a sciatica and an atypical facial pain.

[0220] Neuralgia is pain in the distribution of a nerve or nerves. Examples are trigeminal neuralgia, atypical facial pain, and postherpetic neuralgia (caused by shingles or herpes). The affected nerves are responsible for sensing touch, temperature and pressure in the facial area from the jaw to the forehead. The disorder generally causes short episodes of excruciating pain, usually for less than two minutes and on only one side of the face. The pain can be described in a variety of ways such as “stabbing,” “sharp,” “like lightning,” “burning,” and even “itchy”. In the atypical form of TN, the pain can also present as severe or merely aching and last for extended periods. The pain associated with TN is recognized as one the most excruciating pains that can be experienced.

[0221] Simple stimuli such as eating, talking, washing the face, or any light touch or sensation can trigger an attack (even the sensation of a gentle breeze). The attacks can occur in clusters or as an isolated attack.

[0222] Symptoms include sharp, stabbing pain or constant, burning pain located anywhere, usually on or near the surface of the body, in the same location for each episode; pain along the path of a specific nerve; impaired function of affected body part due to pain, or muscle weakness due to concomitant motor nerve damage; increased sensitivity of the skin or numbness of the affected skin area (feeling similar to a local anesthetic such as a Novacaine shot); and any touch or pressure is interpreted as pain. Movement may also be painful.

[0223] Trigeminal neuralgia is the most common form of neuralgia. It affects the main sensory nerve of the face, the trigeminal nerve (“trigeminal” literally means “three origins”, referring to the division of the nerve into 3 branches). This condition involves sudden and short attacks of severe pain on the side of the face, along the area supplied by the trigeminal nerve on that side. The pain attacks may be severe enough to cause a facial grimace, which is classically referred to as a painful tic (tic douloureux). Sometimes, the cause of trigeminal neuralgia is a blood vessel or small tumor pressing on the nerve. Disorders such as multiple sclerosis (an inflammatory disease affecting the brain and spinal cord), certain forms of arthritis, and diabetes (high blood sugar) may also cause trigeminal neuralgia, but a cause is not always identified. In this condition, certain movements such as chewing, talking, swallowing, or touching an area of the face may trigger a spasm of excruciating pain.

[0224] A related but rather uncommon neuralgia affects the glosso-pharyngeal nerve, which provides sensation to the throat. Symptoms of this neuralgia are short, shock-like episodes of pain located in the throat.

[0225] Neuralgia may occur after infections such as shingles, which is caused by the varicella-zoster virus, a type of herpesvirus. This neuralgia produces a constant burning pain after the shingles rash has healed. The pain is worsened by movement of or contact with the affected area. Not all of those diagnosed with shingles go on to experience postherpetic neuralgia, which can be more painful than shingles. The pain and sensitivity can last for months or even years. The pain is usually in the form of an intolerable sensitivity to any touch but especially light touch. Postherpetic neuralgia is not restricted to the face; it can occur anywhere on the body but usually occurs at the location of the shingles rash. Depression is not uncommon due to the pain and social isolation during the illness.

[0226] Postherpetic neuralgia may be debilitating long after signs of the original herpes infection have disappeared. Other infectious diseases that may cause neuralgia are syphilis and Lyme disease.

[0227] Diabetes is another common cause of neuralgia. This very common medical problem affects almost 1 out of every 20 Americans during adulthood. Diabetes damages the tiny arteries that supply circulation to the nerves, resulting in nerve fiber malfunction and sometimes nerve loss. Diabetes can produce almost any neuralgia, including trigeminal neuralgia, carpal tunnel syndrome (pain and numbness of the hand and wrist), and meralgia paresthetica (numbness and pain in the thigh due to damage to the lateral femoral cutaneous nerve). Strict control of blood sugar may prevent diabetic nerve damage and may accelerate recovery in patients who do develop neuralgia.

[0228] Other medical conditions that may be associated with neuralgias are chronic renal insufficiency and porphyria—a hereditary disease in which the body cannot rid itself of certain substances produced after the normal breakdown of blood in the body. Certain drugs may also cause this problem.

[0229] 2. Deafferentation.

[0230] Deafferentation indicates a loss of the sensory input from a portion of the body, and can be caused by interruption of either peripheral sensory fibres or nerves from the central nervous system. A deafferentation pain syndrome, includes, without limitation, an injury to the brain or spinal cord, a post-stroke pain, a phantom pain, a paraplegia, a brachial plexus avulsion injuries, lumbar radiculopathies.

[0231] 3. Complex Regional Pain Syndromes (CRPSs)

[0232] CRPS is a chronic pain syndrome resulting from sympathetically-maintained pain, and presents in two forms. CRPS1 currently replaces the term “reflex sympathetic dystrophy syndrome”. It is a chronic nerve disorder that occurs most often in the arms or legs after a minor or major injury. CRPS1 is associated with severe pain; changes in the nails, bone, and skin; and an increased sensitivity to touch in the affected limb. CRPS 2 replaces the term causalgia, and results from an identified injury to the nerve. A CRPS, includes, without limitation, a CRPS Type I (reflex sympathetic dystrophy) and a CRPS Type II (causalgia).

[0233] 4. Neuropathy.

[0234] A neuropathy is a functional or pathological change in a nerve and is characterized clinically by sensory or motor neuron abnormalities.

[0235] Central neuropathy is a functional or pathological change in the central nervous system.

[0236] Peripheral neuropathy is a functional or pathological change in one or more peripheral nerves. The peripheral nerves relay information from your central nervous system (brain and spinal cord) to muscles and other organs and from your skin, joints, and other organs back to your brain. Peripheral neuropathy occurs when these nerves fail to carry information to and from the brain and spinal cord, resulting in pain, loss of sensation, or inability to control muscles. In some cases, the failure of nerves that control blood vessels, intestines, and other organs results in abnormal blood pressure, digestion problems, and loss of other basic body processes. Risk factors for neuropathy include diabetes, heavy alcohol use, and exposure to certain chemicals and drugs. Some people have a hereditary predisposition for neuropathy. Prolonged pressure on a nerve is another risk for developing a nerve injury. Pressure injury may be caused by prolonged immobility (such as a long surgical procedure or lengthy illness) or compression of a nerve by casts, splints, braces, crutches, or other devices. Polyneuropathy implies a widespread process that usually affects both sides of the body equally. The symptoms depend on which type of nerve is affected. The three main types of nerves are sensory, motor, and autonomic. Neuropathy can affect any one or a combination of all three types of nerves. Symptoms also depend on whether the condition affects the whole body or just one nerve (as from an injury). The cause of chronic inflammatory polyneuropathy is an abnormal immune response. The specific antigens, immune processes, and triggering factors are variable and in many cases are unknown. It may occur in association with other conditions such as HIV, inflammatory bowel disease, lupus erythematosis, chronic active hepatitis, and blood cell abnormalities.

[0237] Peripheral neuropathy may involve a function or pathological change to a single nerve or nerve group (mononeuropathy) or a function or pathological change affecting multiple nerves (polyneuropathy).

[0238] Peripheral Neuropathies

[0239] Hereditary Disorders
[0240] Charcot-Marie-Tooth disease
[0241] Friedreich's ataxia

[0242] Systemic or Metabolic Disorders
[0243] Diabetes (diabetic neuropathy)
[0244] Dietary deficiencies (especially vitamin B-12)
[0245] Excessive alcohol use (alcoholic neuropathy)
[0246] Uremia (from kidney failure)
[0247] Cancer

[0248] Infectious or Inflammatory Conditions
[0249] AIDS
[0250] Hepatitis
[0251] Colorado tick fever
[0252] diphtheria
[0253] Guillain-Barre syndrome
[0254] HIV infection without development of AIDS
[0255] leprosy
[0256] Lyme
[0257] polyarteritis nodosa
[0258] rheumatoid arthritis
[0259] sarcoidosis
[0260] Sjogren syndrome
[0261] syphilis
[0262] systemic lupus erythematosus
[0263] amyloid

[0264] Exposure to Toxic Compounds
[0265] sniffing glue or other toxic compounds
[0266] nitrous oxide
[0267] industrial agents—especially solvents
[0268] heavy metals (lead, arsenic, mercury, etc.)
[0269] Neuropathy secondary to drugs like analgesic nephropathy

[0270] Miscellaneous Causes
[0271] ischemia (decreased oxygen/decreased blood flow)
[0272] prolonged exposure to cold temperature

[0273] a. Polyneuropathy

[0274] Polyneuropathy is a peripheral neuropathy involving the loss of movement or sensation to an area caused by damage or destruction to multiple peripheral nerves. Polyneuropathic pain, includes, without limitation, post-polio syndrome, postmastectomy syndrome, diabetic neuropathy, alcohol neuropathy, amyloid, toxins, AIDS, hypothyroidism, uremia, vitamin deficiencies, chemotherapy-induced pain, 2′,3′-didexoycytidine (ddC) treatment, Guillain-Barré syndrome or Fabry's disease.

[0275] b. Mononeuropathy

[0276] Mononeuropathy is a peripheral neuropathy involving loss of movement or sensation to an area caused by damage or destruction to a single peripheral nerve or nerve group. Mononeuropathy is most often caused by damage to a local area resulting from injury or trauma, although occasionally systemic disorders may cause isolated nerve damage (as with mononeuritis multiplex). The usual causes are direct trauma, prolonged pressure on the nerve, and compression of the nerve by swelling or injury to nearby body structures. The damage includes destruction of the myelin sheath (covering) of the nerve or of part of the nerve cell (the axon). This damage slows or prevents conduction of impulses through the nerve. Mononeuropathy may involve any part of the body. Mononeuropathic pain, includes, without limitation, a sciatic nerve dysfunction, a common peroneal nerve dysfunction. a radial nerve dysfunction, an ulnar nerve dysfunction, a cranial mononeuropathy VI, a cranial mononeuropathy VII, a cranial mononeuropathy III (compression type), a cranial mononeuropathy III (diabetic type), an axillary nerve dysfunction, a carpal tunnel syndrome, a femoral nerve dysfunction, a tibial nerve dysfunction, a Bell's palsy, a thoracic outlet syndrome, a carpal tunnel syndrome and a sixth (abducent) nerve palsy

[0277] c. Generalized Peripheral Neuropathies

[0278] Generalized peripheral neuropathies are symmetrical, and usually due to various systematic illnesses and disease processes that affect the peripheral nervous system in its entirety. They are further subdivided into several categories:

[0279] i. Distal axonopathies are the result of some metabolic or toxic derangement of neurons. They may be caused by metabolic diseases such as diabetes, renal failure, deficiency syndromes such as malnutrition and alcoholism, or the effects of toxins or drugs. Distal axonopathy (aka dying back neuropathy) is a type of peripheral neuropathy that results from some metabolic or toxic derangement of peripheral nervous system (PNS) neurons. It is the most common response of nerves to metabolic or toxic disturbances, and as such may be caused by metabolic diseases such as diabetes, renal failure, deficiency syndromes such as malnutrition and alcoholism, or the effects of toxins or drugs. The most common cause of distal axonopathy is diabetes, and the most common distal axonopathy is diabetic neuropathy.

[0280] ii. Myelinopathies are due to a primary attack on myelin causing an acute failure of impulse conduction. The most common cause is acute inflammatory demyelinating polyneuropathy (AIDP; aka Guillain-Barré syndrome), though other causes include chronic inflammatory demyelinating syndrome (CIDP), genetic metabolic disorders (e.g., leukodystrophy), or toxins. Myelinopathy is due to primary destruction of myelin or the myelinating Schwann cells, which leaves the axon intact, but causes an acute failure of impulse conduction. This demyelination slows down or completely blocks the conduction of electrical impulses through the nerve. The most common cause is acute inflammatory demyelinating polyneuropathy (AIDP, better known as Guillain-Barré syndrome), though other causes include chronic inflammatory demyelinating polyneuropathy (CIDP), genetic metabolic disorders (e.g., leukodystrophy or Charcot-Marie-Tooth disease), or toxins.

[0281] iii. Neuronopathies are the result of destruction of peripheral nervous system (PNS) neurons. They may be caused by motor neurone diseases, sensory neuronopathies (e.g., Herpes zoster), toxins or autonomic dysfunction. Neurotoxins may cause neuronopathies, such as the chemotherapy agent vincristine. Neuronopathy is dysfunction due to damage to neurons of the peripheral nervous system (PNS), resulting in a peripheral neuropathy. It may be caused by motor neurone diseases, sensory neuronopathies (e.g., Herpes zoster), toxic substances or autonomic dysfunction. A person with neuronopathy may present in different ways, depending on the cause, the way it affects the nerve cells, and the type of nerve cell that is most affected.

[0282] iv. Focal entrapment neuropathies (e.g., carpal tunnel syndrome).

### II. Inflammatory Pain

[0283] The compounds of the invention may be used to treat pain caused by or otherwise associated with any of the following inflammatory conditions.

[0284] A. Arthritic disorder

[0285] Arthritic disorders include, for example, a rheumatoid arthritis; a juvenile rheumatoid arthritis; a systemic lupus erythematosus (SLE); a gouty arthritis; a scleroderma; an osteoarthritis; a psoriatic arthritis; an ankylosing spondylitis; a Reiter's syndrome (reactive arthritis); an adult Still's disease; an arthritis from a viral infection; an arthritis from a bacterial infection, such as, e.g., a gonococcal arthritis and a non-gonococcal bacterial arthritis (septic arthritis); a Tertiary Lyme disease; a tuberculous arthritis; and an arthritis from a fungal infection, such as, e.g., a blastomycosis

[0286] B. Autoimmune Diseases

[0287] Autoimmune diseases include, for example, a Guillain-Barré syndrome, a Hashimoto's thyroiditis, a pernicious anemia, an Addison's disease, a type I diabetes, a systemic lupus erythematosus, a dermatomyositis, a Sjogren's syndrome, a lupus erythematosus, a multiple sclerosis, a myasthenia gravis, a Reiter's syndrome and a Grave's disease.

[0288] C. Connective Tissue Disorder

[0289] Connective tissue disorders include, for example, a spondyloarthritis a dermatomyositis, and a fibromyalgia.

[0290] D. Injury

[0291] Inflammation caused by injury, including, for example, a crush, puncture, stretch of a tissue or joint, may cause chronic inflammatory pain.

[0292] E. Infection

[0293] Inflammation caused by infection, including, for example, a tuberculosis or an interstitial keratitis may cause chronic inflammatory pain.

[0294] F. Neuritis

[0295] Neuritis is an inflammatory process affecting a nerve or group of nerves. Symptoms depend on the nerves involved, but may include pain, paresthesias, paresis, or hypesthesia (numbness).

[0296] Examples include:
[0297] a. Brachial neuritis
[0298] b. Retrobulbar neuropathy, an inflammatory process affecting the part of the optic nerve lying immediately behind the eyeball.
[0299] c. Optic neuropathy, an inflammatory process affecting the optic nerve causing sudden, reduced vision in the affected eye. The cause of optic neuritis is unknown. The sudden inflammation of the optic nerve (the nerve connecting the eye and the brain) leads to swelling and destruction of the myelin sheath. The inflammation may occasionally be the result of a viral infection, or it may be caused by autoimmune diseases such as multiple sclerosis. Risk factors are related to the possible causes.
[0300] d. Vestibular neuritis, a viral infection causing an inflammatory process affecting the vestibular nerve.

[0301] G. Joint Inflammation

[0302] Inflammation of the joint, such as that caused by bursitis or tendonitis, for example, may cause chronic inflammatory pain.

### III. Headache Pain

[0303] The compounds of the invention may be used to treat pain caused by or otherwise associated with any of the following headache conditions. A headache (medically known as cephalgia) is a condition of mild to severe pain in the head; sometimes neck or upper back pain may also be interpreted as a headache. It may indicate an underlying local or systemic disease or be a disorder in itself.

[0304] A. Muscular/Myogenic Headache

[0305] Muscular/myogenic headaches appear to involve the tightening or tensing of facial and neck muscles; they may radiate to the forehead. Tension headache is the most common form of myogenic headache.

[0306] A tension headache is a condition involving pain or discomfort in the head, scalp, or neck, usually associated with muscle tightness in these areas. Tension headaches result from the contraction of neck and scalp muscles. One cause of this muscle contraction is a response to stress, depression or anxiety. Any activity that causes the head to be held in one position for a long time without moving can cause a headache. Such activities include typing or use of computers, fine work with the hands, and use of a microscope. Sleeping in a cold room or sleeping with the neck in an abnormal position may also trigger this type of headache. A tension-type headache, includes, without limitation, an episodic tension headache and a chronic tension headache.

[0307] B. Vascular Headache

[0308] The most common type of vascular headache is migraine. Other kinds of vascular headaches include cluster headaches, which cause repeated episodes of intense pain, and headaches resulting from high blood pressure

[0309] 1. Migraine

[0310] A migraine is a heterogeneous disorder that generally involves recurring headaches. Migraines are different from other headaches because they occur with other symptoms, such as, e.g., nausea, vomiting, or sensitivity to light. In most people, a throbbing pain is felt only on one side of the head. Clinical features such as type of aura symptoms, presence of prodromes, or associated symptoms such as vertigo, may be seen in subgroups of patients with different underlying pathophysiological and genetic mechanisms. A migraine headache, includes, without limitation, a migraine without aura (common migraine), a migraine with aura (classic migraine), a menstrual migraine, a migraine equivalent (acephalic headache), a complicated migraine, an abdominal migraine and a mixed tension migraine.

[0311] 2. Cluster Headache

[0312] Cluster headaches affect one side of the head (unilateral) and may be associated with tearing of the eyes and nasal congestion. They occurs in clusters, happening repeatedly every day at the same time for several weeks and then remitting.

[0313] D. High Blood Pressure Headache

[0314] E. Traction and Inflammatory Headache

[0315] Traction and inflammatory headaches are usually symptoms of other disorders, ranging from stroke to sinus infection.

[0316] F. Hormone Headache

[0317] G. Rebound Headache

[0318] Rebound headaches, also known as medication overuse headaches, occur when medication is taken too frequently to relieve headache. Rebound headaches frequently occur daily and can be very painful.

[0319] H. Chronic Sinusitis Headache

[0320] Sinusitis is inflammation, either bacterial, fungal, viral, allergic or autoimmune, of the paranasal sinuses. Chronic sinusitis is one of the most common complications of the common cold. Symptoms include: Nasal congestion; facial pain; headache; fever; general malaise; thick green or yellow discharge; feeling of facial ‘fullness’ worsening on bending over. In a small number of cases, chronic maxillary sinusitis can also be brought on by the spreading of bacteria from a dental infection. Chronic hyperplastic eosinophilic sinusitis is a noninfective form of chronic sinusitis.

[0321] I. An Organic Headache

[0322] J. Ictal Headaches

[0323] Ictal headaches are headaches associated with seizure activity.

### IV. Somatic Pain

[0324] The compounds of the invention may be used to treat pain caused by or otherwise associated with any of the following somatic pain conditions. Somatic pain originates from ligaments, tendons, bones, blood vessels, and even nerves themselves. It is detected with somatic nociceptors. The scarcity of pain receptors in these areas produces a dull, poorly-localized pain of longer duration than cutaneous pain; examples include sprains and broken bones. Additional examples include the following.

[0325] A. Excessive Muscle Tension

[0326] Excessive muscle tension can be caused, for example, by a sprain or a strain.

[0327] B. Repetitive Motion Disorders

[0328] Repetitive motion disorders can result from overuse of the hands, wrists, elbows, shoulders, neck, back, hips, knees, feet, legs, or ankles.

[0329] C. Muscle Disorders

[0330] Muscle disorders causing somatic pain include, for example, a polymyositis, a dermatomyositis, a lupus, a fibromyalgia, a polymyalgia rheumatica, and a rhabdomyolysis.

[0331] D. Myalgia

[0332] Myalgia is muscle pain and is a symptom of many diseases and disorders. The most common cause for myalgia is either overuse or over-stretching of a muscle or group of muscles. Myalgia without a traumatic history is often due to viral infections. Longer-term myalgias may be indicative of a metabolic myopathy, some nutritional deficiencies or chronic fatigue syndrome.

[0333] E. Infection

[0334] Infection can cause somatic pain. Examples of such infection include, for example, an abscess in the muscle, a trichinosis, an influenza, a Lyme disease, a malaria, a Rocky Mountain spotted fever, Avian influenza, the common cold, community-acquired pneumonia, meningitis, monkeypox, Severe Acute Respiratory Syndrome, toxic shock syndrome, trichinosis, typhoid fever, and upper respiratory tract infection.

[0335] F. Drugs

[0336] Drugs can cause somatic pain. Such drugs include, for example, cocaine, a statin for lowering cholesterol (such as atorvastatin, simvastatin, and lovastatin), and an ACE inhibitor for lowering blood pressure (such as enalapril and captopril)

### V. Visceral Pain

[0337] The compounds of the invention may be used to treat pain caused by or otherwise associated with any of the following visceral pain conditions. Visceral pain originates from body's viscera, or organs. Visceral nociceptors are located within body organs and internal cavities. The even greater scarcity of nociceptors in these areas produces pain that is usually more aching and of a longer duration than somatic pain. Visceral pain is extremely difficult to localise, and several injuries to visceral tissue exhibit “referred” pain, where the sensation is localised to an area completely unrelated to the site of injury. Examples of visceral pain include the following.

[0338] A. Functional Visceral Pain

[0339] Functional visceral pain includes, for example, an irritable bowel syndrome and a chronic functional abdominal pain (CFAP), a functional constipation and a functional dyspepsia, a non-cardiac chest pain (NCCP) and a chronic abdominal pain.

[0340] B. Chronic Gastrointestinal Inflammation

[0341] Chronic gastrointestinal inflammation includes, for example, a gastritis, an inflammatory bowel disease, like, e.g., a Crohn's disease, an ulcerative colitis, a microscopic colitis, a diverticulitis and a gastroenteritis; an interstitial cystitis; an intestinal ischemia; a cholecystitis; an appendicitis; a gastroesophageal reflux; an ulcer, a nephrolithiasis, a urinary tract infection, a pancreatitis and a hernia.

[0342] C. Autoimmune Pain

[0343] Autoimmune pain includes, for example, a sarcoidosis and a vasculitis.

[0344] D. Organic Visceral Pain

[0345] Organic visceral pain includes, for example, pain resulting from a traumatic, inflammatory or degenerative lesion of the gut or produced by a tumor impinging on sensory innervation.

[0346] E. Treatment-Induced Visceral Pain

[0347] Treatment-induced visceral pain includes, for example, a pain attendant to chemotherapy therapy or a pain attendant to radiation therapy.

### VI. Referred Pain

[0348] The compounds of the invention may be used to treat pain caused by or otherwise associated with any of the following referred pain conditions.

[0349] Referred pain arises from pain localized to an area separate from the site of pain stimulation. Often, referred pain arises when a nerve is compressed or damaged at or near its origin. In this circumstance, the sensation of pain will generally be felt in the territory that the nerve serves, even though the damage originates elsewhere. A common example occurs in intervertebral disc herniation, in which a nerve root arising from the spinal cord is compressed by adjacent disc material. Although pain may arise from the damaged disc itself, pain will also be felt in the region served by the compressed nerve (for example, the thigh, knee, or foot). Relieving the pressure on the nerve root may ameliorate the referred pain, provided that permanent nerve damage has not occurred. Myocardial ischaemia (the loss of blood flow to a part of the heart muscle tissue) is possibly the best known example of referred pain; the sensation can occur in the upper chest as a restricted feeling, or as an ache in the left shoulder, arm or even hand.

[0350] The present invention addresses a wide range of pain conditions, in particular chronic pain conditions. Preferred conditions include cancerous and non-cancerous pain, inflammatory pain and neuropathic pain. The opioid-fusions of the present application are particularly suited to addressing inflammatory pain, though may be less suited to addressing neuropathic pain. The galanin-fusions are more suited to addressing neuropathic pain.

[0351] In use, the polypeptides of the present invention are typically employed in the form of a pharmaceutical composition in association with a pharmaceutical carrier, diluent and/or excipient, although the exact form of the composition may be tailored to the mode of administration. Administration is preferably to a mammal, more preferably to a human.

[0352] The polypeptides may, for example, be employed in the form of a sterile solution for intra-articular administration or intra-cranial administration. Spinal injection (e.g., epidural or intrathecal) is preferred.

[0353] The dosage ranges for administration of the polypeptides of the present invention are those to produce the desired therapeutic effect. It will be appreciated that the dosage range required depends on the precise nature of the components, the route of administration, the nature of the formulation, the age of the patient, the nature, extent or severity of the patient's condition, contraindications, if any, and the judgement of the attending physician.

[0354] Suitable daily dosages are in the range 0.0001-1 mg/kg, preferably 0.0001-0.5 mg/kg, more preferably 0.002-0.5 mg/kg, and particularly preferably 0.004-0.5 mg/kg. The unit dosage can vary from less that 1 microgram to 30 mg, but typically will be in the region of 0.01 to 1 mg per dose, which may be administered daily or preferably less frequently, such as weekly or six monthly.

[0355] A particularly preferred dosing regimen is based on 2.5 ng of fusion protein (e.g., CPNv/A) as the 1× dose. In this regard, preferred dosages are in the range 1×-100× (i.e., 2.5-250 ng). This dosage range is significantly lower (i.e., at least 10-fold, typically 100-fold lower) than would be employed with other types of analgesic molecules such as NSAIDS, morphine, and gabapentin. Moreover, the above-mentioned difference is considerably magnified when the same comparison is made on a molar basis—this is because the fusion proteins of the present invention have a considerably greater Mw than do conventional ‘small’ molecule therapeutics.

[0356] Wide variations in the required dosage, however, are to be expected depending on the precise nature of the components, and the differing efficiencies of various routes of administration.

[0357] Variations in these dosage levels can be adjusted using standard empirical routines for optimisation, as is well understood in the art.

[0358] Compositions suitable for injection may be in the form of solutions, suspensions or emulsions, or dry powders which are dissolved or suspended in a suitable vehicle prior to use.

[0359] Fluid unit dosage forms are typically prepared utilising a pyrogen-free sterile vehicle. The active ingredients, depending on the vehicle and concentration used, can be either dissolved or suspended in the vehicle.

[0360] In preparing administrable solutions, the polypeptides can be dissolved in a vehicle, the solution being made isotonic if necessary by addition of sodium chloride and sterilised by filtration through a sterile filter using aseptic techniques before filling into suitable sterile vials or ampoules and sealing. Alternatively, if solution stability is adequate, the solution in its sealed containers may be sterilised by autoclaving.

[0361] Advantageously additives such as buffering, solubilising, stabilising, preservative or bactericidal, suspending or emulsifying agents may be dissolved in the vehicle.

[0362] Dry powders which are dissolved or suspended in a suitable vehicle prior to use may be prepared by filling pre-sterilised drug substance and other ingredients into a sterile container using aseptic technique in a sterile area.

[0363] Alternatively the polypeptides and other ingredients may be dissolved in an aqueous vehicle, the solution is sterilized by filtration and distributed into suitable containers using aseptic technique in a sterile area. The product is then freeze dried and the containers are sealed aseptically.

[0364] Parenteral suspensions, suitable for intramuscular, subcutaneous or intradermal injection, are prepared in substantially the same manner, except that the sterile components are suspended in the sterile vehicle, instead of being dissolved and sterilisation cannot be accomplished by filtration. The components may be isolated in a sterile state or alternatively it may be sterilised after isolation, e.g., by gamma irradiation.

[0365] Advantageously, a suspending agent for example polyvinylpyrrolidone is included in the composition/s to facilitate uniform distribution of the components.

### DEFINITIONS SECTION

[0366] Targeting Moiety (TM) means any chemical structure associated with an agent that functionally interacts with a Binding Site to cause a physical association between the agent and the surface of a target cell. In the context of the present invention, the target cell is a nociceptive sensory afferent. The term TM embraces any molecule (i.e., a naturally occurring molecule, or a chemically/physically modified variant thereof) that is capable of binding to a Binding Site on the target cell, which Binding Site is capable of internalisation (e.g., endosome formation)—also referred to as receptor-mediated endocytosis. The TM may possess an endosomal membrane translocation function, in which case separate TM and Translocation Domain components need not be present in an agent of the present invention.

[0367] The TM of the present invention binds (preferably specifically binds) to a nociceptive sensory afferent (e.g., a primary nociceptive afferent). In this regard, specifically binds means that the TM binds to a nociceptive sensory afferent (e.g., a primary nociceptive afferent) with a greater affinity than it binds to other neurons such as non-nociceptive afferents, and/or to motor neurons (i.e., the natural target for clostridial neurotoxin holotoxin). The term “specifically binding” can also mean that a given TM binds to a given receptor, for example Mrg receptors such as MrgX1, opioid receptors such as OPRD1 and/or OPRM1, BDKRB1 and/or BDKRB2, Tachykinin receptors such as TACR1, TACR2 and/or TACR3, Kappa receptor (OPRK1) and/or ORL₁ receptor, with a binding affinity (Kₐ) of 10⁶ M⁻¹ or greater, preferably 10⁷ M⁻¹ or greater, more preferably 10⁸M⁻¹ or greater, and most preferably, 10⁹M⁻¹ or greater.

[0368] For the purposes of this invention, an agonist is defined as a molecule that is capable of stimulating the process of exocytic fusion in a target cell, which process is susceptible to inhibition by a protease (or fragment thereof) capable of cleaving a protein of the exocytic fusion apparatus in said target cell.

[0369] Accordingly, the particular agonist definition of the present invention would exclude many molecules that would be conventionally considered as agonists.

[0370] For example, nerve growth factor (NGF) is an agonist in respect of its ability to promote neuronal differentiation via binding to a TrkA receptor. However, NGF is not an agonist when assessed by the above criteria because it is not a principal inducer of exocytic fusion. In addition, the process that NGF stimulates (i.e., cell differentiation) is not susceptible to inhibition by the protease activity of a non-cytotoxic toxin molecule.

[0371] The term “fragment”, when used in relation to a protein, means a peptide having at least thirty-five, preferably at least twenty-five, more preferably at least twenty, and most preferably at least 19, 18, 17, 16, 15, 14, 13, 12, 11, 10, 9, 8, 7, 6 or 5 amino acid residues of the protein in question.

[0372] The term “variant”, when used in relation to a protein, means a peptide or peptide fragment of the protein that contains one or more analogues of an amino acid (e.g., an unnatural amino acid), or a substituted linkage.

[0373] The term “derivative”, when used in relation to a protein, means a protein that comprises the protein in question, and a further peptide sequence. The further peptide sequence should preferably not interfere with the basic folding and thus conformational structure of the original protein. Two or more peptides (or fragments, or variants) may be joined together to form a derivative. Alternatively, a peptide (or fragment, or variant) may be joined to an unrelated molecule (e.g., a second, unrelated peptide). Derivatives may be chemically synthesized, but will be typically prepared by recombinant nucleic acid methods. Additional components such as lipid, and/or polysaccharide, and/or polypeptide components may be included.

[0374] Throughout this specification, reference to the “ORL₁ receptor” embraces all members of the ORL₁ receptor family. Members of the ORL₁ receptor family typically have a seven transmembrane domain structure and are coupled to G-proteins of the Gᵢ and G₀ families. A method for determining the G-protein-stimulating activity of ligands of the ORL₁ receptor is given in Example 12. A method for measuring reduction in cellular cAMP levels following ORL₁ activation is given in Example 11. A further characteristic of members of the ORL₁ receptor family is that they are typically able to bind nociceptin (the natural ligand of ORL₁). As an example, all alternative splice variants of the ORL₁ receptor, are members of the ORL₁ receptor family.

[0375] The term non-cytotoxic means that the protease molecule in question does not kill the target cell to which it has been re-targeted.

[0376] The protease of the present invention embraces all naturally-occurring non-cytotoxic proteases that are capable of cleaving one or more proteins of the exocytic fusion apparatus in eukaryotic cells.

[0377] The protease of the present invention is preferably a bacterial protease (or fragment thereof). More preferably the bacterial protease is selected from the genera Clostridium or Neisseria (e.g., a clostridial L-chain, or a neisserial IgA protease preferably from N. gonorrhoeae).

[0378] The present invention also embraces modified non-cytotoxic proteases, which include amino acid sequences that do not occur in nature and/or synthetic amino acid residues, so long as the modified proteases still demonstrate the above-mentioned protease activity.

[0379] The protease of the present invention preferably demonstrates a serine or metalloprotease activity (e.g., endopeptidase activity). The protease is preferably specific for a SNARE protein (e.g., SNAP-25, synaptobrevin/VAMP, or syntaxin).

[0380] Particular mention is made to the protease domains of neurotoxins, for example the protease domains of bacterial neurotoxins. Thus, the present invention embraces the use of neurotoxin domains, which occur in nature, as well as recombinantly prepared versions of said naturally-occurring neurotoxins.

[0381] Exemplary neurotoxins are produced by clostridia, and the term clostridial neurotoxin embraces neurotoxins produced by C. tetani (TeNT), and by C. botulinum (BoNT) serotypes A-G, as well as the closely related BoNT-like neurotoxins produced by C. baratii and C. butyricum. The above-mentioned abbreviations are used throughout the present specification. For example, the nomenclature BoNT/A denotes the source of neurotoxin as BoNT (serotype A). Corresponding nomenclature applies to other BoNT serotypes.

[0382] The term L-chain fragment means a component of the L-chain of a neurotoxin, which fragment demonstrates a metalloprotease activity and is capable of proteolytically cleaving a vesicle and/or plasma membrane associated protein involved in cellular exocytosis.

[0383] A Translocation Domain is a molecule that enables translocation of a protease (or fragment thereof) into a target cell such that a functional expression of protease activity occurs within the cytosol of the target cell. Whether any molecule (e.g., a protein or peptide) possesses the requisite translocation function of the present invention may be confirmed by any one of a number of conventional assays.

[0384] For example, Shone C. (1987) describes an in vitro assay employing liposomes, which are challenged with a test molecule. Presence of the requisite translocation function is confirmed by release from the liposomes of K⁺ and/or labelled NAD, which may be readily monitored (see Shone C., 1987, Eur. J. Biochem, 167(1):175-180).

[0385] A further example is provided by Blaustein R. (1987), which describes a simple in vitro assay employing planar phospholipid bilayer membranes. The membranes are challenged with a test molecule and the requisite translocation function is confirmed by an increase in conductance across said membranes (see Blaustein, 1987, FEBS Letts, 226(1):115-120).

[0386] Additional methodology to enable assessment of membrane fusion and thus identification of Translocation Domains suitable for use in the present invention are provided by Methods in Enzymology Vols. 220 and 221, Membrane Fusion Techniques, Parts A and B, Academic Press, 1993.

[0387] The Translocation Domain is preferably capable of formation of ion-permeable pores in lipid membranes under conditions of low pH. Preferably it has been found to use only those portions of the protein molecule capable of pore-formation within the endosomal membrane.

[0388] The Translocation Domain may be obtained from a microbial protein source, in particular from a bacterial or viral protein source. Hence, in one embodiment, the Translocation Domain is a translocating domain of an enzyme, such as a bacterial toxin or viral protein.

[0389] It is well documented that certain domains of bacterial toxin molecules are capable of forming such pores. It is also known that certain translocation domains of virally expressed membrane fusion proteins are capable of forming such pores. Such domains may be employed in the present invention.

[0390] The Translocation Domain may be of a clostridial origin, namely the H_{N} domain (or a functional component thereof). H_{N} means a portion or fragment of the H-chain of a clostridial neurotoxin approximately equivalent to the amino-terminal half of the H-chain, or the domain corresponding to that fragment in the intact H-chain. It is preferred that the H-chain substantially lacks the natural binding function of the H_{C} component of the H-chain. In this regard, the H_{C} function may be removed by deletion of the H_{C} amino acid sequence (either at the DNA synthesis level, or at the post-synthesis level by nuclease or protease treatment). Alternatively, the H_{C} function may be inactivated by chemical or biological treatment. Thus, the H-chain is preferably incapable of binding to the Binding Site on a target cell to which native clostridial neurotoxin (i.e., holotoxin) binds.

[0391] In one embodiment, the translocation domain is a H_{N} domain (or a fragment thereof) of a clostridial neurotoxin. Examples of suitable clostridial Translocation Domains include:
[0392] Botulinum type A neurotoxin—amino acid residues (449-871)
[0393] Botulinum type B neurotoxin—amino acid residues (441-858)
[0394] Botulinum type C neurotoxin—amino acid residues (442-866)
[0395] Botulinum type D neurotoxin—amino acid residues (446-862)
[0396] Botulinum type E neurotoxin—amino acid residues (423-845)
[0397] Botulinum type F neurotoxin—amino acid residues (440-864)
[0398] Botulinum type G neurotoxin—amino acid residues (442-863)
[0399] Tetanus neurotoxin—amino acid residues (458-879)

[0400] For further details on the genetic basis of toxin production in Clostridium botulinum and C. tetani, we refer to Henderson et al. (1997) in The Clostridia: Molecular Biology and Pathogenesis, Academic Press.

[0401] The term H_{N} embraces naturally-occurring neurotoxin H_{N} portions, and modified H_{N} portions having amino acid sequences that do not occur in nature and/or synthetic amino acid residues, so long as the modified H_{N} portions still demonstrate the above-mentioned translocation function.

[0402] Alternatively, the Translocation Domain may be of a non-clostridial origin (see Table 4). Examples of non-clostridial Translocation Domain origins include, but not be restricted to, the translocation domain of diphtheria toxin (O'Keefe et al., Proc. Natl. Acad. Sci. USA (1992) 89:6202-6206; Silverman et al., J. Biol. Chem. (1993) 269:22524-22532; and London, E., Biochem. Biophys. Acta. (1992) 1112:25-51), the translocation domain of Pseudomonas exotoxin type A (Prior et al., Biochemistry (1992) 31:3555-3559), the translocation domains of anthrax toxin (Blanke et al., Proc. Natl. Acad. Sci. USA (1996) 93:8437-8442), a variety of fusogenic or hydrophobic peptides of translocating function (Plank et al., J. Biol. Chem. (1994) 269:12918-12924; and Wagner et al., Proc. Natl. Acad. Sci. USA (1992) 89:7934-7938), and amphiphilic peptides (Murata et al., Biochemistry (1992) 31:1986-1992). The Translocation Domain may mirror the Translocation Domain present in a naturally-occurring protein, or may include amino acid variations so long as the variations do not destroy the translocating ability of the Translocation Domain.

[0403] Particular examples of viral Translocation Domains suitable for use in the present invention include certain translocating domains of virally expressed membrane fusion proteins. For example, Wagner et al. (1992) supra and Murata et al. (1992) supra describe the translocation (i.e., membrane fusion and vesiculation) function of a number of fusogenic and amphiphilic peptides derived from the N-terminal region of influenza virus haemagglutinin. Other virally expressed membrane fusion proteins known to have the desired translocating activity are a translocating domain of a fusogenic peptide of Semliki Forest Virus (SFV), a translocating domain of vesicular stomatitis virus (VSV) glycoprotein G, a translocating domain of SER virus F protein and a translocating domain of Foamy virus envelope glycoprotein. Virally encoded Aspike proteins have particular application in the context of the present invention, for example, the E1 protein of SFV and the G protein of the G protein of VSV.

[0404] Use of the Translocation Domains listed in Table (below) includes use of sequence variants thereof. A variant may comprise one or more conservative nucleic acid substitutions and/or nucleic acid deletions or insertions, with the proviso that the variant possesses the requisite translocating function. A variant may also comprise one or more amino acid substitutions and/or amino acid deletions or insertions, so long as the variant possesses the requisite translocating function.

| Translocation | | |
|---|---|---|
| domain source | Amino acid residues | References |
| Diphtheria toxin | 194-380 | Silverman et al., 1994, |
| | | J. Biol. Chem. 269: |
| | | 22524-22532 |
| | | London E., 1992, |
| | | Biochem. Biophys. |
| | | Acta., 1113: 25-51 |
| Domain II of | 405-613 | Prior et al., 1992, |
| pseudomonas | | Biochemistry 31: |
| exotoxin | | 3555-3559 Kihara |
| | | & Pastan, 1994, Bioconj. |
| | | Chem. 5: 532-538 |
| Influenza virus | GLFGAIAGFIENGWEG | Plank et al., 1994, |
| haemagglutinin | MIDGWYG, and | J. Biol. Chem. |
| | Variants thereof | 269: 12918-12924 |
| | | Wagner et al., 1992, |
| | | PNAS, 89: 7934-7938 |
| | | Murata et al., 1992, |
| | | Biochemistry 31: |
| | | 1986-1992 |
| Semliki Forest virus | Translocation domain | Kielian et al., 1996, |
| fusogenic protein | | J. Cell Biol. 134(4): |
| | | 863-872 |
| Vesicular Stomatitis | 118-139 | Yao et al., 2003, |
| virus glycoprotein G | | Virology 310(2): |
| | | 319-332 |
| SER virus F protein | Translocation domain | Seth et al., 2003, |
| | | J. Virol. 77(11): |
| | | 6520-6527 |
| Foamy virus | Translocation domain | Picard-Maureau et al., |
| envelope | | 2003, J. Virol. 77(8): |
| glycoprotein | | 4722-4730 |

### SEQ ID NOS

[0405] Where an initial Met amino acid residue or a corresponding initial codon is indicated in any of the following SEQ ID NOs, said residue/codon is optional.
[0406] SEQ ID NO:1 DNA sequence of the LC/A
[0407] SEQ ID NO:2 DNA sequence of the H_{N}/A
[0408] SEQ ID NO:3 DNA sequence of the LC/B
[0409] SEQ ID NO:4 DNA sequence of the H_{N}/B
[0410] SEQ ID NO:5 DNA sequence of the LC/C
[0411] SEQ ID NO:6 DNA sequence of the H_{N}/C
[0412] SEQ ID NO:7 DNA sequence of the CPN-A linker
[0413] SEQ ID NO:8 DNA sequence of the A linker
[0414] SEQ ID NO:9 DNA sequence of the N-terminal presentation nociceptin insert
[0415] SEQ ID NO:10 DNA sequence of the CPN-C linker
[0416] SEQ ID NO:11 DNA sequence of the CPBE-A linker
[0417] SEQ ID NO:12 DNA sequence of the CPNvar-A linker
[0418] SEQ ID NO:13 DNA sequence of the LC/A-CPN-H_{N}/A fusion
[0419] SEQ ID NO:14 Protein sequence of the LC/A-CPN-H_{N}/A fusion
[0420] SEQ ID NO:15 DNA sequence of the N-LC/A-H_{N}/A fusion
[0421] SEQ ID NO:16 Protein sequence of the N-LC/A-H_{N}/A fusion
[0422] SEQ ID NO:17 DNA sequence of the LC/C-CPN-H_{N}/C fusion
[0423] SEQ ID NO:18 Protein sequence of the LC/C-CPN-H_{N}/C fusion
[0424] SEQ ID NO:19 DNA sequence of the LC/C-CPN-H_{N}/C (A-linker) fusion
[0425] SEQ ID NO:20 Protein sequence of the LC/C-CPN-H_{N}/C (A-linker) fusion
[0426] SEQ ID NO:21 DNA sequence of the LC/A-CPME-H_{N}/A fusion
[0427] SEQ ID NO:22 Protein sequence of the LC/A-CPME-H_{N}/A fusion
[0428] SEQ ID NO:23 DNA sequence of the LC/A-CPBE-H_{N}/A fusion
[0429] SEQ ID NO:24 Protein sequence of the LC/A-CPBE-H_{N}/A fusion
[0430] SEQ ID NO:25 DNA sequence of the LC/A-CPNv-H_{N}/A fusion
[0431] SEQ ID NO:26 Protein sequence of the LC/A-CPNv-H_{N}/A fusion
[0432] SEQ ID NO:27 DNA sequence of the LC/A-CPN[1-11]-HN/A fusion
[0433] SEQ ID NO:28 Protein sequence of the LC/A-CPN[1-11]-HN/A fusion
[0434] SEQ ID NO:29 DNA sequence of the LC/A-CPN[[Y10]1-11]-HN/A fusion
[0435] SEQ ID NO:30 Protein sequence of the LC/A-CPN[[Y10]1-11]-HN/A fusion
[0436] SEQ ID NO:31 DNA sequence of the LC/A-CPN[[Y11]1-11]-HN/A fusion
[0437] SEQ ID NO:32 Protein sequence of the LC/A-CPN[[Y11]1-11]-HN/A fusion
[0438] SEQ ID NO:33 DNA sequence of the LC/A-CPN[[Y14]1-17]-HN/A fusion
[0439] SEQ ID NO:34 Protein sequence of the LC/A-CPN[[Y14]1-17]-HN/A fusion
[0440] SEQ ID NO:35 DNA sequence of the LC/A-CPN[1-13]-HN/A fusion
[0441] SEQ ID NO:36 Protein sequence of the LC/A-CPN[1-13]-HN/A fusion
[0442] SEQ ID NO:37 DNA sequence of CPN[1-17]
[0443] SEQ ID NO:38 Protein Sequence of CPN[1-17]
[0444] SEQ ID NO:39 DNA sequence of CPN[1-11]
[0445] SEQ ID NO:40 Protein sequence of CPN[1-11]
[0446] SEQ ID NO:41 DNA sequence of CPN[[Y10]1-11]
[0447] SEQ ID NO:42 Protein sequence of CPN[[Y10]1-11]
[0448] SEQ ID NO:43 DNA sequence of CPN[[Y11]1-11]
[0449] SEQ ID NO:44 Protein sequence of CPN[[Y11]1-11]
[0450] SEQ ID NO:45 DNA sequence of CPN[[Y14]1-17]
[0451] SEQ ID NO:46 Protein sequence of CPN[[Y14]1-17]
[0452] SEQ ID NO:47 DNA sequence of CPN[1-13]
[0453] SEQ ID NO:48 Protein sequence of CPN[1-13]
[0454] SEQ ID NO:49 DNA sequence of CPNv (also known as N[[R14K15]1-17])
[0455] SEQ ID NO:50 Protein sequence of CPNv (also known as N[[R14K15]1-17])
[0456] SEQ ID NO:51 DNA sequence of the nociceptin-spacer-LC/A-H_{N}/A fusion
[0457] SEQ ID NO:52 Protein sequence of the nociceptin-spacer-LC/A-H_{N}/A fusion
[0458] SEQ ID NO:53 DNA sequence of the CPN-A GS10 linker
[0459] SEQ ID NO:54 DNA sequence of the CPN-A GS15 linker
[0460] SEQ ID NO:55 DNA sequence of the CPN-A GS25 linker
[0461] SEQ ID NO:56 DNA sequence of the CPN-A GS30 linker
[0462] SEQ ID NO:57 DNA sequence of the CPN-A HX27 linker
[0463] SEQ ID NO:58 DNA sequence of the LC/A-CPN(GS15)-H_{N}/A fusion
[0464] SEQ ID NO:59 Protein sequence of the LC/A-CPN(GS15)-H_{N}/A fusion
[0465] SEQ ID NO:60 DNA sequence of the LC/A-CPN(GS25)-H_{N}/A fusion
[0466] SEQ ID NO:61 Protein sequence of the LC/A-CPN(GS25)-H_{N}/A fusion
[0467] SEQ ID NO:62 DNA sequence of the CPNvar-A Enterokinase activatable linker
[0468] SEQ ID NO:63 DNA sequence of the LC/A-CPNv(Ek)-H_{N}/A fusion
[0469] SEQ ID NO:64 Protein sequence of the LC/A-CPNv(Ek)-H_{N}/A fusion
[0470] SEQ ID NO:65 DNA sequence of the CPNvar-A linker
[0471] SEQ ID NO:66 DNA sequence of the LC/C-CPNv-H_{N}/C fusion (act. A)
[0472] SEQ ID NO:67 Protein sequence of the LC/C-CPNv-H_{N}/C fusion (act. A)
[0473] SEQ ID NO:68 DNA sequence of the LC/A-CPLE-H_{N}/A fusion
[0474] SEQ ID NO:69 Protein sequence of the LC/A-CPLE-H_{N}/A fusion
[0475] SEQ ID NO:70 DNA sequence of the LC/A-CPOP-H_{N}/A fusion
[0476] SEQ ID NO:71 Protein sequence of the LC/A-CPOP-H_{N}/A fusion
[0477] SEQ ID NO:72 DNA sequence of the LC/A-CPOPv-H_{N}/A fusion
[0478] SEQ ID NO:73 Protein sequence of the LC/A-CPOPv-H_{N}/A fusion
[0479] SEQ ID NO:74 DNA sequence of the IgA protease
[0480] SEQ ID NO:75 DNA sequence of the IgA-CPNv-H_{N}/A fusion
[0481] SEQ ID NO:76 Protein sequence of the IgA-CPNv-H_{N}/A fusion
[0482] SEQ ID NO:77 DNA sequence of the FXa-HT
[0483] SEQ ID NO:78 DNA sequence of the CPNv-A-FXa-HT
[0484] SEQ ID NO:79 Protein sequence of the CPNv-A-FXa-HT fusion
[0485] SEQ ID NO:80 DNA sequence of the DT translocation domain
[0486] SEQ ID NO:81 DNA sequence of the CPLE-DT-A
[0487] SEQ ID NO:82 Protein sequence of the CPLE-DT-A fusion
[0488] SEQ ID NO:83 DNA sequence of the TeNT LC
[0489] SEQ ID NO:84 DNA sequence of the CPNv-TENT LC
[0490] SEQ ID NO:85 Protein sequence of the CPNV-TeNT LC fusion
[0491] SEQ ID NO:86 DNA sequence of the CPNvar-C linker
[0492] SEQ ID NO:87 DNA sequence of the LC/C-CPNv-H_{N}/C fusion (act. C)
[0493] SEQ ID NO:88 Protein sequence of the LC/C-CPNv-H_{N}/C fusion (act. C)
[0494] SEQ ID NO:89 Protein sequence of dynorphin
[0495] SEQ ID NO:90 DNA sequence of LC/A-CPDY-H_{N}/A fusion
[0496] SEQ ID NO:91 Protein sequence of LC/A-CPDY-H_{N}/A fusion
[0497] SEQ ID NO:92 Protein sequence of LC/A-CPDY(GS10)-H_{N}/A fusion
[0498] SEQ ID NO:93 Protein sequence of LC/A-CPDY(GS15)-H_{N}/A fusion
[0499] SEQ ID NO:94 Protein sequence of LC/A-CPDY(GS25)-H_{N}/A fusion
[0500] SEQ ID NO:95 Protein sequence of LC/C-CPDY-H_{N}/C fusion
[0501] SEQ ID NO:96 Protein sequence of IgA-CPDY-H_{N}/A fusion
[0502] SEQ ID NO:97 Protein sequence of CPDY-TeNT LC fusion
[0503] SEQ ID NO:98 Protein sequence of LC/A-CPDY-H_{N}/A (GS30) fusion
[0504] SEQ ID NO:99 Protein sequence of LC/A-CPDY-H_{N}/A (HX27) fusion
[0505] SEQ ID NO:100 Protein sequence of LC/B-CPDY-H_{N}/B fusion
[0506] SEQ ID NO:101 Protein sequence of LC/A-CPDY1-13-H_{N}/A fusion
[0507] SEQ ID NO:102 Protein sequence of LC/A-CPDY(D15A)-H_{N}/A fusion
[0508] SEQ ID NO:103 Protein sequence of LC/A-CPDY(D15A)-H_{N}/A (GS30) fusion
[0509] SEQ ID NO:104 Protein sequence of LC/A-CPDY1-13-H_{N}/A (GS30) fusion
[0510] SEQ ID NO:105 Protein sequence of LC/A-CPDY(18RP10RD15A)-H_{N}/A fusion
[0511] SEQ ID NO:106 Protein sequence of LC/A-CPDY(18RP10R)1-13-H_{N}/A fusion
[0512] SEQ ID NO:107 Protein sequence of LC/A-CPDNv9-H_{N}/A fusion
[0513] SEQ ID NO:108 Protein sequence of BAM1-22
[0514] SEQ ID NO:109 Protein sequence of BAMS-22
[0515] SEQ ID NO:110 DNA sequence of LC/A-CPBAM(1-22)-H_{N}/A fusion
[0516] SEQ ID NO:111 Protein sequence of LC/A-CPBAM(1-22)-H_{N}/A fusion
[0517] SEQ ID NO:112 Protein sequence of LC/A-H_{N}/A-BAM(8-22)-H_{N}/A fusion
[0518] SEQ ID NO:113 Protein sequence of LC/A-CPBAM(8-22)-H_{N}/A fusion
[0519] SEQ ID NO:114 Protein sequence of β-endorphin
[0520] SEQ ID NO:115 Protein sequence of LC/D-CPBE-H_{N}/D fusion
[0521] SEQ ID NO:116 Protein sequence of LC/B-CPBE-H_{N}/B fusion
[0522] SEQ ID NO:117 Protein sequence of bradykinin
[0523] SEQ ID NO:118 Protein sequence of des Arg⁹-BK
[0524] SEQ ID NO:119 DNA sequence of LC/A-H_{N}/A-BK fusion
[0525] SEQ ID NO:120 Protein sequence of LC/A-H_{N}/A-BK fusion
[0526] SEQ ID NO:121 Protein sequence of LC/A-H_{N}/A-des Arg⁹-BK fusion
[0527] SEQ ID NO:122 Protein sequence of Substance P
[0528] SEQ ID NO:123 Protein sequence of Substance P analogue (S60)
[0529] SEQ ID NO:124 Protein sequence of LC/A-HN/A-S6 fusion
[0530] SEQ ID NO:125 Protein sequence of LC/B-CPNv-H_{N}/B fusion
[0531] SEQ ID NO:126 Protein sequence of LC/D-CPNv-H_{N}D fusion[
[0532] SEQ ID NO:127 DNA sequence of LC/D
[0533] SEQ ID NO:128 DNA sequence of H_{N}/D
[0534] SEQ ID NO:129 Protein sequence of LHA-EN-CPDNv9
[0535] SEQ ID NO:130 Protein sequence of LHA-CPOPv
[0536] SEQ ID NO:131 Protein sequence of LHA-EN-CPNv
[0537] SEQ ID NO:132 Protein sequence of LHA-Xa-GS-BA-ss
[0538] SEQ ID NO:133 Protein sequence of LHA-EK-CPBAM8-22-GS20-HnA-HT
[0539] SEQ ID NO:134 Protein sequence of LHA-EK-CPBAM1-22-GS20-HnA-HT
[0540] SEQ ID NO:135 Protein sequence of LHA-Xa-CPBE-HT
[0541] SEQ ID NO:136 Protein sequence of LHA-Xa-CPBE-HT
[0542] SEQ ID NO:137 Protein sequence of LHB-Xa-CPBE-HT
[0543] SEQ ID NO:138 Protein sequence of LHD-Xa-CPBE-HT
[0544] SEQ ID NO:139 Protein sequence of LHA-BK
[0545] SEQ ID NO:140 Protein sequence of LHA-EN-CPDY-HT
[0546] SEQ ID NO:141 Protein sequence of LHA-EN-CPDY1-13-GS20-HT
[0547] SEQ ID NO:142 Protein sequence of LHA-EN-CPDY-GS30-HT
[0548] SEQ ID NO:143 Protein sequence of LHA-EN-CPDY13-GS30-HT
[0549] SEQ ID NO:144 Protein sequence of LHA-EN-CPDY(D15A)-GS20-HT
[0550] SEQ ID NO:145 Protein sequence of LHA-EN-CPDY(D15A)-GS30-HT
[0551] SEQ ID NO:146 Protein sequence of LHB-EN-CPDY-HT
[0552] SEQ ID NO:147 Protein sequence of LHA-EN-CPDYI8RP10RD15A-GS20-HT
[0553] SEQ ID NO:148 Protein sequence of LHA-EN-CPDY(18RP10R)1-13-GS20-HT
[0554] SEQ ID NO:149 Protein sequence of LHA-EN-CPDY-HX27-HT
[0555] SEQ ID NO:150 Protein sequence of LHA-EN-CPDNv9-HT
[0556] SEQ ID NO:151 Protein sequence of LHA-Xa-CPNv-HT
[0557] SEQ ID NO:152 Protein sequence of LHC-Xa-CPNv-HT
[0558] SEQ ID NO:153 Protein sequence of LHD-EN-CPNv-HT
[0559] SEQ ID NO:154 Protein sequence of LHA-Xa-CPN-HT
[0560] SEQ ID NO:155 Protein sequence of LHB-EN-CPNv-HT
[0561] SEQ ID NO:156 Protein sequence of LHA-CPOPv-HT
[0562] SEQ ID NO:157 Protein sequence of LHA-Xa-GS-S6-ss

### EXAMPLES

### Example 1

### Preparation of a LC/A and H_{N}/A Backbone Clones

[0563] The following procedure creates the LC and H_{N} fragments for use as the component backbone for multidomain fusion expression. This example is based on preparation of a serotype A based clone (SEQ ID NO:1 and SEQ ID NO:2), though the procedures and methods are equally applicable to the other serotypes (illustrated by the sequence listing for serotype B (SEQ ID NO:3 and SEQ ID NO:4) and serotype C (SEQ ID NO:5 and SEQ ID NO:6)).

### Preparation of Cloning and Expression Vectors

[0564] pCR 4 (Invitrogen) is the chosen standard cloning vector, selected due to the lack of restriction sequences within the vector and adjacent sequencing primer sites for easy construct confirmation. The expression vector is based on the pMAL (NEB) expression vector, which has the desired restriction sequences within the multiple cloning site in the correct orientation for construct insertion (BamHI-SalI-PstI-HindIII). A fragment of the expression vector has been removed to create a non-mobilisable plasmid and a variety of different fusion tags have been inserted to increase purification options.

### Preparation of Protease (e.g., LC/A) Insert

[0565] The LC/A (SEQ ID NO:1) is created by one of two ways:

[0566] The DNA sequence is designed by back translation of the LC/A amino acid sequence (obtained from freely available database sources such as GenBank (accession number P10845) or Swissprot (accession locus BXA1_CLOBO) using one of a variety of reverse translation software tools (for example EditSeq best E. coli reverse translation (DNASTAR Inc.), or Backtranslation tool v2.0 (Entelechon)). BamHI/SalI recognition sequences are incorporated at the 5′ and 3′ ends respectively of the sequence, maintaining the correct reading frame. The DNA sequence is screened (using software such as MapDraw, DNASTAR Inc.) for restriction enzyme cleavage sequences incorporated during the back translation. Any cleavage sequences that are found to be common to those required by the cloning system are removed manually from the proposed coding sequence ensuring common E. coli codon usage is maintained. E. coli codon usage is assessed by reference to software programs such as Graphical Codon Usage Analyser (Geneart), and the % GC content and codon usage ratio assessed by reference to published codon usage tables (for example GenBank Release 143, 13 Sep. 2004). This optimised DNA sequence containing the LC/A open reading frame (ORF) is then commercially synthesized (for example by Entelechon, Geneart or Sigma-Genosys) and is provided in the pCR 4 vector.

[0567] The alternative method is to use PCR amplification from an existing DNA sequence with BamHI and SalI restriction enzyme sequences incorporated into the 5′ and 3′ PCR primers respectively. Complementary oligonucleotide primers are chemically synthesised by a supplier (for example MWG or Sigma-Genosys), so that each pair has the ability to hybridize to the opposite strands (3′ ends pointing “towards” each other) flanking the stretch of Clostridium target DNA, one oligonucleotide for each of the two DNA strands. To generate a PCR product the pair of short oligonucleotide primers specific for the Clostridium DNA sequence are mixed with the Clostridium DNA template and other reaction components and placed in a machine (the ‘PCR machine’) that can change the incubation temperature of the reaction tube automatically, cycling between approximately 94° C. (for denaturation), 55° C. (for oligonucleotide annealing), and 72° C. (for synthesis). Other reagents required for amplification of a PCR product include a DNA polymerase (such as Taq or Pfu polymerase), each of the four nucleotide dNTP building blocks of DNA in equimolar amounts (50-200 μM) and a buffer appropriate for the enzyme optimised for Mg²⁺ concentration (0.5-5 mM).

[0568] The amplification product is cloned into pCR 4 using either, TOPO TA cloning for Taq PCR products or Zero Blunt TOPO cloning for Pfu PCR products (both kits commercially available from Invitrogen). The resultant clone is checked by sequencing. Any additional restriction sequences which are not compatible with the cloning system are then removed using site directed mutagenesis (for example, using Quickchange (Stratagene Inc.)).

### Preparation of Translocation (e.g., H_{N}) Insert

[0569] The H_{N}/A (SEQ ID NO:2) is created by one of two ways:

[0570] The DNA sequence is designed by back translation of the H_{N}/A amino acid sequence (obtained from freely available database sources such as GenBank (accession number P10845) or Swissprot (accession locus BXA1_CLOBO)) using one of a variety of reverse translation software tools (for example EditSeq best E. coli reverse translation (DNASTAR Inc.), or Backtranslation tool v2.0 (Entelechon)). A PstI restriction sequence added to the N-terminus and XbaI-stop codon-HindIII to the C-terminus ensuring the correct reading frame is maintained. The DNA sequence is screened (using software such as MapDraw, DNASTAR Inc.) for restriction enzyme cleavage sequences incorporated during the back translation. Any sequences that are found to be common to those required by the cloning system are removed manually from the proposed coding sequence ensuring common E. coli codon usage is maintained. E. coli codon usage is assessed by reference to software programs such as Graphical Codon Usage Analyser (Geneart), and the % GC content and codon usage ratio assessed by reference to published codon usage tables (for example GenBank Release 143, 13 Sep. 2004). This optimised DNA sequence is then commercially synthesized (for example by Entelechon, Geneart or Sigma-Genosys) and is provided in the pCR 4 vector.

[0571] The alternative method is to use PCR amplification from an existing DNA sequence with PstI and XbaI-stop codon-HindIII restriction enzyme sequences incorporated into the 5′ and 3′ PCR primers respectively. The PCR amplification is performed as described above. The PCR product is inserted into pCR 4 vector and checked by sequencing. Any additional restriction sequences which are not compatible with the cloning system are then removed using site directed mutagenesis [for example using Quickchange (Stratagene Inc.)].

### Example 2

### Preparation of a LC/A-nociceptin-H_{N}/A Fusion Protein (Nociceptin is N-Terminal of the H_{N}-Chain)

### Preparation of Linker-Nociceptin-Spacer Insert

[0572] The LC-H_{N} linker can be designed from first principle, using the existing sequence information for the linker as the template. For example, the serotype A linker (in this case defined as the inter-domain polypeptide region that exists between the cysteines of the disulphide bridge between LC and H_{N}) is 23 amino acids long and has the sequence VRGIITSKTKSLDKGYNKALNDL. Within this sequence, it is understood that proteolytic activation in nature leads to an H_{N} domain that has an N-terminus of the sequence ALNDL. This sequence information is freely available from available database sources such as GenBank (accession number P10845) or Swissprot (accession locus BXA1_CLOBO). Into this linker a Factor Xa site, nociceptin and spacer are incorporated; and using one of a variety of reverse translation software tools [for example EditSeq best E. coli reverse translation (DNASTAR Inc.), or Backtranslation tool v2.0 (Entelechon)], the DNA sequence encoding the linker-ligand-spacer region is determined. Restriction sites are then incorporated into the DNA sequence and can be arranged as BamHI-SalI-linker-protease site-nociceptin-NheI-spacer-SpeI-PstI-XbaI-stop codon-HindIII (SEQ ID NO:7). It is important to ensure the correct reading frame is maintained for the spacer, nociceptin and restriction sequences and that the XbaI sequence is not preceded by the bases, TC, which would result on DAM methylation. The DNA sequence is screened for restriction sequence incorporation, and any additional sequences are removed manually from the remaining sequence ensuring common E. coli codon usage is maintained. E. coli codon usage is assessed by reference to software programs such as Graphical Codon Usage Analyser (Geneart), and the % GC content and codon usage ratio assessed by reference to published codon usage tables (for example, GenBank Release 143, 13 Sep. 2004). This optimised DNA sequence is then commercially synthesized (for example by Entelechon, Geneart or Sigma-Genosys) and is provided in the pCR 4 vector.

### Preparation of the LC/A-nociceptin-H_{N}/A Fusion

[0573] In order to create the LC-linker-nociceptin-spacer-H_{N} construct (SEQ ID NO:13), the pCR 4 vector encoding the linker (SEQ ID NO:7) is cleaved with BamHI+SalI restriction enzymes. This cleaved vector then serves as the recipient vector for insertion and ligation of the LC/A DNA (SEQ ID NO:1) cleaved with BamHI+SalI. The resulting plasmid DNA is then cleaved with PstI+XbaI restriction enzymes and serves as the recipient vector for the insertion and ligation of the H_{N}/A DNA (SEQ ID NO:2) cleaved with PstI+XbaI. The final construct contains the LC-linker-nociceptin-spacer-H_{N} ORF (SEQ ID NO:13) for transfer into expression vectors for expression to result in a fusion protein of the sequence illustrated in SEQ ID NO:14.

### Example 3

### Preparation of a nociceptin-LC/A-H_{N}/A Fusion Protein (Nociceptin is N-Terminal of the LC-Chain)

[0574] The LC/A-H_{N}/A backbone is constructed as described in Example 2 using the synthesised A serotype linker with the addition of a Factor Xa site for activation, arranged as BamHI-SalI-linker-protease site-linker-PstI-XbaI-stop codon-HindIII (SEQ ID NO:8). The LC/A-H_{N}/A backbone and the synthesised N-terminal presentation nociceptin insert (SEQ ID NO:9) are cleaved with BamHI+HindIII restriction enzymes, gel purified and ligated together to create a nociceptin-spacer-LC-linker-H_{N}. The ORF (SEQ ID NO:15) is then cut out using restriction enzymes AvaI+XbaI for transfer into expression vectors for expression to result in a fusion protein of the sequence illustrated in SEQ ID NO:16.

### Example 4

### Preparation of a LC/C-nociceptin-H_{N}/C Fusion Protein

[0575] Following the methods used in Examples 1 and 2, the LC/C (SEQ ID NO:5) and

[0576] H_{N}/C (SEQ ID NO:6) are created and inserted into the C serotype linker arranged as BamHI-SalI-linker-protease site-nociceptin-NheI-spacer-SpeI-PstI-XbaI-stop codon-HindIII (SEQ ID NO:10). The final construct contains the LC-linker-nociceptin-spacer-H_{N} ORF (SEQ ID NO:17) for expression as a protein of the sequence illustrated in SEQ ID NO:18.

### Example 5

### Preparation of a LC/C-nociceptin-H_{N}/C Fusion Protein with a Serotype A Activation Sequence

[0577] Following the methods used in Examples 1 and 2, the LC/C (SEQ ID NO:5) and H_{N}/C (SEQ ID NO:6) are created and inserted into the A serotype linker arranged as BamHI-SalI-linker-protease site-nociceptin-NheI-spacer-SpeI-PstI-XbaI-stop codon-HindIII (SEQ ID NO:7). The final construct contains the LC-linker-nociceptin-spacer-H_{N} ORF (SEQ ID NO:19) for expression as a protein of the sequence illustrated in SEQ ID NO:20.

### Example 6

### Preparation of a LC/A-MET enkephalin-H_{N}/A Fusion Protein

[0578] Due to the small, five-amino acid, size of the met-enkephalin ligand the LC/A-met enkephalin-H_{N}/A fusion is created by site directed mutagenesis (for example using Quickchange (Stratagene Inc.)) using the LC/A-nociceptin-H_{N}/A fusion (SEQ ID NO:13) as a template. Oligonucleotides are designed encoding the YGGFM met-enkephalin peptide, ensuring standard E. coli codon usage is maintained and no additional restriction sites are incorporated, flanked by sequences complimentary to the linker region of the LC/A-nociceptin-H_{N}/A fusion (SEQ ID NO:13) either side on the nociceptin section. The SDM product is checked by sequencing and the final construct containing the LC-linker-met enkephalin-spacer-H_{N} ORF (SEQ ID NO:21) for expression as a protein of the sequence illustrated in SEQ ID NO:22.

### Example 7

### Preparation of a LC/A-B endorphin-H_{N}/A Fusion Protein

[0579] Following the methods used in Examples 1 and 2, the LC/A (SEQ ID NO:1) and H_{N}/A (SEQ ID NO:2) are created and inserted into the A serotype β endorphin linker arranged as BamHI-SalI-linker-protease site-β endorphin-NheI-spacer-SpeI-PstI-XbaI-stop codon-HindIII (SEQ ID NO:11). The final construct contains the LC-linker-13 endorphin-spacer-H_{N} ORF (SEQ ID NO:23) for expression as a protein of the sequence illustrated in SEQ ID NO:24.

### Example 8

### Preparation of a LC/A-nociceptin Variant-H_{N}/A Fusion Protein

[0580] Following the methods used in Examples 1 and 2, the LC/A (SEQ ID NO:1) and H_{N}/A (SEQ ID NO:2) are created and inserted into the A serotype nociceptin variant linker arranged as BamHI-SalI-linker-protease site-nociceptin variant-NheI-spacer-SpeI-PstI-XbaI-stop codon-HindIII (SEQ ID NO:12). The final construct contains the LC-linker-nociceptin variant-spacer-H_{N} ORF (SEQ ID NO:25) for expression as a protein of the sequence illustrated in SEQ ID NO:26.

### Example 9

### Purification Method for LC/A-nociceptin-H_{N}/A Fusion Protein

[0581] Defrost falcon tube containing 25 ml 50 mM HEPES pH 7.2, 200 mM NaCl and approximately 10 g of E. coli BL21 cell paste. Make the thawed cell paste up to 80 ml with 50 mM HEPES pH 7.2, 200 mM NaCl and sonicate on ice 30 seconds on, 30 seconds off for 10 cycles at a power of 22 microns ensuring the sample remains cool. Spin the lysed cells at 18 000 rpm, 4° C. for 30 minutes. Load the supernatant onto a 0.1 M NiSO₄ charged Chelating column (20-30 ml column is sufficient) equilibrated with 50 mM HEPES pH 7.2, 200 mM NaCl. Using a step gradient of 10 and 40 mM imidazol, wash away the non-specific bound protein and elute the fusion protein with 100 mM imidazol. Dialyse the eluted fusion protein against 5 L of 50 mM HEPES pH 7.2, 200 mM NaCl at 4° C. overnight and measure the OD of the dialysed fusion protein. Add 1 unit of factor Xa per 100 μg fusion protein and Incubate at 25° C. static overnight. Load onto a 0.1 M NiSO₄ charged Chelating column (20-30 ml column is sufficient) equilibrated with 50 mM HEPES pH 7.2, 200 mM NaCl. Wash column to baseline with 50 mM HEPES pH 7.2, 200 mM NaCl. Using a step gradient of 10 and 40 mM imidazol, wash away the non-specific bound protein and elute the fusion protein with 100 mM imidazol. Dialyse the eluted fusion protein against 5 L of 50 mM HEPES pH 7.2, 200 mM NaCl at 4° C. overnight and concentrate the fusion to about 2 mg/ml, aliquot sample and freeze at −20° C. Test purified protein using OD, BCA, purity analysis and SNAP-25 assessments.

### Example 10

### Confirmation of TM Agonist Activity by Measuring Release of Substance P From Neuronal Cell Cultures

### Materials

[0582] Substance P EIA is obtained from R&D Systems, UK.

### Methods

[0583] Primary neuronal cultures of eDRG are established as described previously (Duggan et al., 2002, J. Biol. Chem., 277:34846-34852). Substance P release from the cultures is assessed by EIA, essentially as described previously (Duggan et al., 2002, J. Biol. Chem., 277:34846-34852). The TM of interest is added to the neuronal cultures (established for at least 2 weeks prior to treatment); control cultures are performed in parallel by addition of vehicle in place of TM. Stimulated (100 mM KCl) and basal release, together with total cell lysate content, of substance P are obtained for both control and TM treated cultures. Substance P immunoreactivity is measured using Substance P Enzyme Immunoassay Kits (Cayman Chemical Company, USA or R&D Systems, UK) according to manufacturers' instructions.

[0584] The amount of Substance P released by the neuronal cells in the presence of the TM of interest is compared to the release obtained in the presence and absence of 100 mM KCl. Stimulation of Substance P release by the TM of interest above the basal release, establishes that the TM of interest is an “agonist ligand” as defined in this specification. If desired the stimulation of Substance P release by the TM of interest can be compared to a standard Substance P release-curve produced using the natural ORL₁ receptor ligand, nociceptin (Tocris).

### Example 11

### Confirmation of ORL₁ Receptor Activation by Measuring Forskolin-Stimulated Camp Production

[0585] Confirmation that a given TM is acting via the ORL₁ receptor is provided by the following test, in which the TMs ability to inhibit forskolin-stimulated cAMP production is assessed.

### Materials

[0586] [³H]adenine and [¹⁴C]cAMP are obtained from GE Healthcare

### Methods

[0587] The test is conducted essentially as described previously by Meunier et al. (Isolation and structure of the endogenous agonist of opioid receptor-like ORL₁ receptor. Nature 377: 532-535, 1995) in intact transfected-CHO cells plated on 24-well plastic plates.

[0588] To the cells is added [³H]adenine (1.0 μCi) in 0.4 ml of culture medium. The cells remain at 37° C. for 2 h to allow the adenine to incorporate into the intracellular ATP pool. After 2 h, the cells are washed once with incubation buffer containing: 130 mM NaCl, 4.8 mM KCl, 1.2 mM KH₂PO₄, 1.3 mM CaCl₂, 1.2 mM MgSO₄, 10 mM glucose, 1 mg/ml bovine serum albumin and 25 mM HEPES pH 7.4, and replaced with buffer containing forskolin (10 μM) and isobutylmethylxanthine (50 μM) with or without the TM of interest. After 10 min, the medium is aspirated and replaced with 0.5 ml, 0.2 M HCl. Approximately 1000 cpm of [¹⁴C]cAMP is added to each well and used as an internal standard. The contents of the wells are then transferred to columns of 0.65 g dry alumina powder. The columns are eluted with 4 ml of 5 mM HCl, 0.5 ml of 0.1 M ammonium acetate, then two additional millilitres of ammonium acetate. The final eluate is collected into scintillation vials and counted for ¹⁴C and tritium. Amounts collected are corrected for recovery of [¹⁴C]cAMP. TMs that are agonists at the ORL₁ receptor cause a reduction in the level of cAMP produced in response to forskolin.

### Example 12

### Confirmation of ORL₁ Receptor Activation Using a GTPγS Binding Functional Assay

[0589] Confirmation that a given TM is acting via the ORL₁ receptor is also provided by the following test, a GTPγS binding functional assay.

### Materials

[0590] [³⁵S]GTPγS is obtained from GE Healthcare Wheatgerm agglutinin-coated (SPA) beads are obtained from GE Healthcare

### Methods

[0591] This assay is carried out essentially as described by Traynor and Nahorski (Modulation by μ-opioid agonists of guanosine-5-O-[³⁵S]thio)triphosphate binding to membranes from human neuroblastoma SH-SY5Y cells. Mol. Pharmacol. 47: 848-854, 1995).

[0592] Cells are scraped from tissue culture dishes into 20 mM HEPES, 1 mM ethylenediaminetetraacetic acid, then centrifuged at 500×g for 10 min. Cells are resuspended in this buffer and homogenized with a Polytron Homogenizer.

[0593] The homogenate is centrifuged at 27,000×g for 15 min, and the pellet resuspended in buffer A, containing: 20 mM HEPES, 10 mM MgCl₂, 100 mM NaCl, pH 7.4. The suspension is recentrifuged at 20,000×g and suspended once more in buffer A. For the binding assay, membranes (8-15 μg protein) are incubated with [³⁵S]GTP S (50 pM), GDP (10 μM), with and without the TM of interest, in a total volume of 1.0 ml, for 60 min at 25° C. Samples are filtered over glass fibre filters and counted as described for the binding assays.

### Example 13

### Preparation of a LC/A-nociceptin-H_{N}/A Fusion Protein (Nociceptin is N-Terminal of the H_{N}-Chain)

[0594] The linker-nociceptin-spacer insert is prepared as described in Example 2.

### Preparation of the LC/A-nociceptin-H_{N}/A Fusion

[0595] In order to create the LC-linker-nociceptin-spacer-H_{N} construct (SEQ ID NO:13), the pCR 4 vector encoding the linker (SEQ ID NO:7) is cleaved with BamHI+SalI restriction enzymes. This cleaved vector then serves as the recipient for insertion and ligation of the LC/A DNA (SEQ ID NO:1) also cleaved with BamHI+SalI. The resulting plasmid DNA is then cleaved with BamHI+HindIII restriction enzymes and the LC/A-linker fragment inserted into a similarly cleaved vector containing a unique multiple cloning site for BamHI, SalI, PstI, and HindIII such as the pMAL vector (NEB). The H_{N}/A DNA (SEQ ID NO:2) is then cleaved with PstI+HindIII restriction enzymes and inserted into the similarly cleaved pMAL-LC/A-linker construct. The final construct contains the LC-linker-nociceptin-spacer-H_{N} ORF (SEQ ID NO:13) for expression as a protein of the sequence illustrated in SEQ ID NO:14.

### Example 14

### Preparation of a Nociceptin-LC/A-H_{N}/A Fusion Protein (Nociceptin is N-Terminal of the LC-Chain)

[0596] In order to create the nociceptin-spacer-LC/A-H_{N}/A construct, an A serotype linker with the addition of a Factor Xa site for activation, arranged as BamHI-SalI-linker-protease site-linker-PstI-XbaI-stop codon-HindIII (SEQ ID NO:8) is synthesised as described in Example 13. The pCR 4 vector encoding the linker is cleaved with BamHI+SalI restriction enzymes. This cleaved vector then serves as the recipient for insertion and ligation of the LC/A DNA (SEQ ID NO:1) also cleaved with BamHI+SalI. The resulting plasmid DNA is then cleaved with BamHI+HindIII restriction enzymes and the LC/A-linker fragment inserted into a similarly cleaved vector containing the synthesised N-terminal presentation nociceptin insert (SEQ ID NO:9). This construct is then cleaved with AvaI+HindIII and inserted into an expression vector such as the pMAL plasmid (NEB). The H_{N}/A DNA (SEQ ID NO:2) is then cleaved with PstI+HindIII restriction enzymes and inserted into the similarly cleaved pMAL-nociceptin-LC/A-linker construct. The final construct contains the nociceptin-spacer-LC/A-H_{N}/A ORF (SEQ ID NO:51) for expression as a protein of the sequence illustrated in SEQ ID NO:52.

### Example 15

### Preparation and Purification of an LC/A-nociceptin-H_{N}/A Fusion Protein Family with Variable Spacer Length

[0597] Using the same strategy as employed in Example 2, a range of DNA linkers were prepared that encoded nociceptin and variable spacer content. Using one of a variety of reverse translation software tools (for example EditSeq best E. coli reverse translation (DNASTAR Inc.), or Backtranslation tool v2.0 (Entelechon)), the DNA sequence encoding the linker-ligand-spacer region is determined. Restriction sites are then incorporated into the DNA sequence and can be arranged as BamHI-SalI-linker-protease site-nociceptin-NheI-spacer-SpeI-PstI-XbaI-stop codon-HindIII (SEQ ID NO:53 to SEQ ID NO:57). It is important to ensure the correct reading frame is maintained for the spacer, nociceptin and restriction sequences and that the XbaI sequence is not preceded by the bases, TC which would result on DAM methylation. The DNA sequence is screened for restriction sequence incorporation and any additional sequences are removed manually from the remaining sequence ensuring common E. coli codon usage is maintained. E. coli codon usage is assessed by reference to software programs such as Graphical Codon Usage Analyser (Geneart), and the % GC content and codon usage ratio assessed by reference to published codon usage tables (for example GenBank Release 143, 13 Sep. 2004). This optimised DNA sequence is then commercially synthesized (for example by Entelechon, Geneart or Sigma-Genosys) and is provided in the pCR 4 vector.

[0598] The spacers that were created included:

TABLE 1

| | | SEQ ID NO |
|---|---|---|
| | | of the |
| | | linker |
| Code | Protein sequence of the linker | DNA |
| GS10 | ALAGGGGSALVLQ | 53 |
| GS15 | ALAGGGGSGGGGSALVLQ | 54 |
| GS25 | ALAGGGGSGGGGSGGGGSGGGGSALVLQ | 55 |
| GS30 | ALAGGGGSGGGGSGGGGSGGGGSGGGGSALVLQ | 56 |
| Hx27 | ALAAEAAAKEAAAKEAAAKAGGGGSALVLQ | 57 |

[0599] By way of example, in order to create the LC/A-CPN(GS15)-H_{N}/A fusion construct (SEQ ID NO:58), the pCR 4 vector encoding the linker (SEQ ID NO:54) is cleaved with BamHI+SalI restriction enzymes. This cleaved vector then serves as the recipient vector for insertion and ligation of the LC/A DNA (SEQ ID NO:1) also cleaved with BamHI+SalI. The resulting plasmid DNA is then cleaved with BamHI+HindIII restriction enzymes and the LC/A-linker fragment inserted into a similarly cleaved vector containing a unique multiple cloning site for BamHI, SalI, PstI, and HindIII such as the pMAL vector (NEB). The H_{N}/A DNA (SEQ ID NO:2) is then cleaved with PstI+HindIII restriction enzymes and inserted into the similarly cleaved pMAL-LC/A-linker construct. The final construct contains the LC/A-CPN(GS15)-H_{N}/A ORF (SEQ ID NO:58) for expression as a protein of the sequence illustrated in SEQ ID NO:59.

[0600] As a further example, to create the LC/A-CPN(GS25)-H_{N}/A fusion construct (SEQ ID NO:60), the pCR 4 vector encoding the linker (SEQ ID NO:55) is cleaved with BamHI+SalI restriction enzymes. This cleaved vector then serves as the recipient vector for insertion and ligation of the LC/A DNA (SEQ ID NO:1) cleaved with BamHI+SalI. The resulting plasmid DNA is then cleaved with BamHI+HindIII restriction enzymes and the LC/A-linker fragment inserted into a similarly cleaved vector containing a unique multiple cloning site for BamHI, SalI, PstI, and HindIII such as the pMAL vector (NEB). The H_{N}/A DNA (SEQ ID NO:2) is then cleaved with PstI+HindIII restriction enzymes and inserted into the similarly cleaved pMAL-LC/A-linker construct. The final construct contains the LC/A-CPN(GS25)-H_{N}/A ORF (SEQ ID NO:60) for expression as a protein of the sequence illustrated in SEQ ID NO:61.

[0601] Variants of the LC/A-CPN-H_{N}/A fusion consisting of GS10, GS30 and Hx27 are similarly created. Using the purification methodology described in Example 9, fusion protein is purified from E. coli cell paste. FIG. 9 illustrates the purified product obtained in the case of LC/A-CPN(GS10)-H_{N}/A, LC/A-CPN(GS15)-H_{N}/A, LC/A-CPN(GS25)-H_{N}/A, LC/A-CPN(GS30)-H_{N}/A and LC/A-CPN(Hx27)-H_{N}/A.

### Example 16

### Assessment of In Vitro Efficacy of an LC/A-nociceptin-H_{N}/A Fusion

[0602] Fusion protein prepared according to Examples 2 and 9 was assessed in the eDRG neuronal cell model.

[0603] Assays for the inhibition of substance P release and cleavage of SNAP-25 have been previously reported (Duggan et al., 2002, J. Biol. Chem., 277:34846-34852). Briefly, dorsal root ganglia neurons are harvested from 15-day-old fetal Sprague-Dawley rats and dissociated cells plated onto 24-well plates coated with Matrigel at a density of 1×10⁶ cells/well. One day post-plating the cells are treated with 1 μM cytosine β-D-arabinofuranoside for 48 h. Cells are maintained in Dulbecco's minimal essential medium supplemented with 5% heat-inactivated fetal bovine serum, 5 mM L-glutamine, 0.6% D-glucose, 2% B27 supplement, and 100 ng/ml 2.5S mouse nerve growth factor. Cultures are maintained for 2 weeks at 37° C. in 95% air/5% CO₂ before addition of test materials.

[0604] Release of substance P from eDRG is assessed by enzyme-linked immunosorbent assay. Briefly, eDRG cells are washed twice with low potassium-balanced salt solution (BSS: 5 mM KCl, 137 mM NaCl, 1.2 mM MgCl₂, 5 mM glucose, 0.44 mM KH₂PO₄, 20 mM HEPES, pH 7.4, 2 mM CaCl₂). Basal samples are obtained by incubating each well for 5 min. with 1 ml of low potassium BSS. After removal of this buffer, the cells are stimulated to release by incubation with 1 ml of high potassium buffer (BSS as above with modification to include 100 mM KCl isotonically balanced with NaCl) for 5 min. All samples are removed to tubes on ice prior to assay of substance P. Total cell lysates are prepared by addition of 250 μl of 2 M acetic acid/0.1% trifluoroacetic acid to lyse the cells, centrifugal evaporation, and resuspension in 500 μl of assay buffer. Diluted samples are assessed for substance P content. Substance P immunoreactivity is measured using Substance P Enzyme Immunoassay Kits (Cayman Chemical Company or R&D Systems) according to manufacturers' instructions. Substance P is expressed in pg/ml relative to a standard substance P curve run in parallel.

[0605] SDS-PAGE and Western blot analysis were performed using standard protocols (Novex). SNAP-25 proteins were resolved on a 12% Tris/glycine polyacrylamide gel (Novex) and subsequently transferred to nitrocellulose membrane. The membranes were probed with a monoclonal antibody (SMI-81) that recognises cleaved and intact SNAP-25. Specific binding was visualised using peroxidase-conjugated secondary antibodies and a chemiluminescent detection system. Cleavage of SNAP-25 was quantified by scanning densitometry (Molecular Dynamics Personal SI, ImageQuant data analysis software). Percent SNAP-25 cleavage was calculated according to the formula: (Cleaved SNAP-25/(Cleaved+Intact SNAP-25))×100.

[0606] Following exposure of eDRG neurons to an LC/A-nociceptin-H_{N}/A fusion (termed CPN-A), both inhibition of substance P release and cleavage of SNAP-25 are observed (FIG. 10). After 24 h exposure to the fusion, 50% of maximal SNAP-25 cleavage is achieved by a fusion concentration of 6.3±2.5 nM.

[0607] The effect of the fusion is also assessed at defined time points following a 16 h exposure of eDRG to CPN-A. FIG. 11 illustrates the prolonged duration of action of the CPN-A fusion protein, with measurable activity still being observed at 28 days post exposure.

### Example 17

### Assessment of In Vitro Efficacy of an LC/A-nociceptin Variant-H_{N}/A Fusion

[0608] Fusion protein prepared according to Examples 8 and 9 was assessed in the eDRG neuronal cell mode using the method described in Example 16.

[0609] Following exposure of eDRG neurons to an LC/A-nociceptin variant-H_{N}/A fusion (termed CPNv-A), both inhibition of substance P release and cleavage of SNAP-25 are observed. After 24 h exposure to the fusion, 50% of maximal SNAP-25 cleavage is achieved by a fusion concentration of 1.4±0.4 nM (FIG. 12).

[0610] The effect of the fusion is also assessed at defined time points following a 16 h exposure of eDRG to CPN-A. FIG. 13 illustrates the prolonged duration of action of the CPN-A fusion protein, with measurable activity still being observed at 24 days post exposure.

[0611] The binding capability of the CPNv-A fusion protein is also assessed in comparison to the CPN-A fusion. FIG. 14 illustrates the results of a competition experiment to determine binding efficacy at the ORL-1 receptor. CPNv-A is demonstrated to displace [³H]-nociceptin, thereby confirming that access to the receptor is possible with the ligand in the central presentation format.

### Example 18

### Preparation of an LC/A-nociceptin Variant-H_{N}/A Fusion Protein that is Activated by Treatment with Enterokinase

[0612] Following the methods used in Examples 1 and 2, the LC/A (SEQ ID NO:1) and H_{N}/A (SEQ ID NO:2) are created and inserted into the A serotype nociceptin variant linker arranged as BamHI-SalI-linker-enterokinase protease site-nociceptin variant-NheI-spacer-SpeI-PstI-XbaI-stop codon-HindIII (SEQ ID NO:62). The final construct contains the LC-linker-nociceptin variant-spacer-H_{N} ORF sequences (SEQ ID NO:63) for expression as a protein of the sequence illustrated in SEQ ID NO:64. The fusion protein is termed CPNv(Ek)-A. FIG. 15 illustrates the purification of CPNv(Ek)-A from E. coli following the methods used in Example 9 but using Enterokinase for activation at 0.00064 μg per 100 μg of fusion protein.

### Example 19

### Assessment of In Vitro Efficacy of a LC/A-nociceptin variant-H_{N}/A Fusion that has been Activated by Treatment with Enterokinase

[0613] The CPNv(Ek)-A prepared in Example 18 is obtained in a purified form and applied to the eDRG cell model to assess cleavage of SNAP-25 (using methodology from Example 16). FIG. 16 illustrates the cleavage of SNAP-25 following 24 h exposure of eDRG to CPNv(Ek)-A. The efficiency of cleavage is observed to be similar to that achieved with the Factor Xa-cleaved material, as recorded in Example 17.

### Example 20

### Preparation of an LC/C-nociceptin Variant-H_{N}/C Fusion Protein with a Factor Xa Activation Linker Derived from Serotype A

[0614] Following the methods used in Example 4, the LC/C (SEQ ID NO:5) and H_{N}/C (SEQ ID NO:6) are created and inserted into the A serotype nociceptin variant linker arranged as BamHI-SalI-linker-nociceptin variant-NheI-spacer-SpeI-PstI-XbaI-stop codon-HindIII (SEQ ID NO:65). The final construct contains the LC-linker-nociceptin variant-spacer-H_{N} ORF sequences (SEQ ID NO:66) for expression as a protein of the sequence illustrated in SEQ ID NO:67. The fusion protein is termed CPNv-C (act. A). FIG. 17 illustrates the purification of CPNv-C (act. A) from E. coli following the methods used in Example 9.

### Example 21

### Assessment of In Vitro Efficacy of an LC/C-nociceptin Variant-H_{N}/C Fusion Protein

[0615] Following the methods used in Example 9, the CPNv-C (act. A) prepared in Example 20 is obtained in a purified form and applied to the eDRG cell model to assess cleavage of SNAP-25 (using methodology from Example 16). After 24 h exposure to the fusion, 50% of maximal syntaxin cleavage is achieved by a fusion concentration of 3.1±2.0 nM. FIG. 18 illustrates the cleavage of syntaxin following 24 h exposure of eDRG to CPNv-C (act. A).

### Example 22

### Assessment of In Vivo Efficacy of an LC/A-nociceptin-HN/A Fusion

[0616] The ability of an LC/A-nociceptin-H_{N}/A fusion (CPN/A) to inhibit acute capsaicin-induced mechanical allodynia is evaluated following subcutaneous intraplantar injection in the rat hind paw. Test animals are evaluated for paw withdrawal frequency (PWF %) in response to a 10 g Von Frey filament stimulus series (10 stimuli×3 trials) prior to recruitment into the study, after subcutaneous treatment with CPN/A but before capsaicin, and following capsaicin challenge post-injection of CPN/A (average of responses at 15′ and 30′). Capsaicin challenge is achieved by injection of 10 μl of a 0.3% solution. Sample dilutions are prepared in 0.5% BSA/saline. FIG. 19 illustrates the reversal of mechanical allodynia that is achieved by pre-treatment of the animals with a range of concentrations of LC/A-nociceptin-HN/A fusion.

[0617] The ability of an LC/A-nociceptin-HN/A fusion (CPN/A) to inhibit streptozotocin (STZ)-induced mechanical (tactile) allodynia in rats is evaluated. STZ-induced mechanical allodynia in rats is achieved by injection of streptozotocin (i.p. or i.v.) which yields destruction of pancreatic β-cells leading to loss of insulin production, with concomitant metabolic stress (hyperglycemia and hyperlipidemia). As such, STZ induces Type I diabetes. In addition, STZ treatment leads to progressive development of neuropathy, which serves as a model of chronic pain with hyperalgesia and allodynia that may reflect signs observed in diabetic humans (peripheral diabetic neuropathy).

[0618] Male Sprague-Dawley rats (250-300 g) are treated with 65 mg/kg STZ in citrate buffer (I.V.) and blood glucose and lipid are measured weekly to define the readiness of the model. Paw Withdrawal Threshold (PWT) is measured in response to a Von Frey filament stimulus series over a period of time. Allodynia is said to be established when the PWT on two consecutive test dates (separated by 1 week) measures below 6 g on the scale. At this point, rats are randomized to either a saline group (negative efficacy control), gabapentin group (positive efficacy control) or a test group (CPN/A). Test materials (20-25 μl) are injected subcutaneously as a single injection (except gabapentin) and the PWT is measured at 1 day post-treatment and periodically thereafter over a 2-week period. Gabapentin (30 mg/kg i.p. @ 3 ml/kg injection volume) is injected daily, 2 hours prior to the start of PWT testing. FIG. 20 illustrates the reversal of allodynia achieved by pre-treatment of the animals with 750 ng of CPN/A. Data were obtained over a 2-week period after a single injection of CPN/A

### Example 23

### Assessment of In Vivo Efficacy of an LC/A-nociceptin Variant-H_{N}/A Fusion

[0619] The ability of an LC/A-nociceptin variant-H_{N}/A fusion (CPNv/A) to inhibit capsaicin-induced mechanical allodynia is evaluated following subcutaneous intraplantar injection in the rat hind paw. Test animals are evaluated for paw withdrawal frequency (PWF %) in response to a 10 g Von Frey filament stimulus series (10 stimuli×3 trials) prior to recruitment into the study (Pre-Treat); after subcutaneous intraplantar treatment with CPNv/A but before capsaicin (Pre-CAP); and following capsaicin challenge post-injection of CPNv/A (average of responses at 15′ and 30′; CAP). Capsaicin challenge is achieved by injection of 10 μl of a 0.3% solution. Sample dilutions are prepared in 0.5% BSA/saline.

[0620] FIG. 21 illustrates the reversal of allodynia that is achieved by pre-treatment of the animals with a range of concentrations of LC/A-nociceptin variant-H_{N}/A fusion in comparison to the reversal achieved with the addition of LC/A-nociceptin-H_{N}/A fusion. These data are expressed as a normalized paw withdrawal frequency differential, in which the difference between the peak response (post-capsaicin) and the baseline response (pre-capsaicin) is expressed as a percentage. With this analysis, it can be seen that CPNv/A is more potent than CPN/A since a lower dose of CPNv/A is required to achieve similar analgesic effect to that seen with CPN/A.

### Example 24

### Preparation of an LC/A-leu enkephalin-H_{N}/A Fusion Protein

[0621] Due to the small, five-amino acid, size of the leu-enkephalin ligand the LC/A-leu enkephalin-H_{N}/A fusion is created by site directed mutagenesis (for example using Quickchange® (Stratagene Inc.)), using the LC/A-nociceptin-H_{N}/A fusion (SEQ ID NO:13) as a template. Oligonucleotides are designed encoding the YGGFL leu-enkephalin peptide, ensuring standard E. coli codon usage is maintained and no additional restriction sites are incorporated, flanked by sequences complimentary to the linker region of the LC/A-nociceptin-H_{N}/A fusion (SEQ ID NO:13) either side on the nociceptin section. The SDM product is checked by sequencing and the final construct containing the LC-linker-leu enkephalin-spacer-H_{N} ORF (SEQ ID NO:68) for expression as a protein of the sequence illustrated in SEQ ID NO:69. The fusion protein is termed CPLE-A. FIG. 22 illustrates the purification of CPLE-A from E. coli following the methods used in Example 9.

### Example 25

### Expression and Purification of an LC/A-beta-endorphin-H_{N}/A Fusion Protein

[0622] Following the methods used in Example 9, and with the LC/A-beta-endorphin-H_{N}/A fusion protein (termed CPBE-A) created in Example 7, the CPBE-A is purified from E. coli. FIG. 23 illustrates the purified protein as analysed by SDS-PAGE.

### Example 26

### Preparation of an LC/A-nociceptin Mutant-H_{N}/A Fusion Protein

[0623] Due to the single amino acid modification necessary to mutate the nociceptin sequence at position 1 from a Phe to a Tyr, the LC/A-nociceptin mutant-H_{N}/A fusion is created by site directed mutagenesis (for example using Quickchange® (Stratagene Inc.)), using the LC/A-nociceptin-H_{N}/A fusion (SEQ ID NO:13) as a template. Oligonucleotides are designed encoding tyrosine at position 1 of the nociceptin sequence, ensuring standard E. coli codon usage is maintained and no additional restriction sites are incorporated, flanked by sequences complimentary to the linker region of the LC/A-nociceptin-H_{N}/A fusion (SEQ ID NO:13) either side on the nociceptin section. The SDM product is checked by sequencing and the final construct containing the LC/A-nociceptin mutant-spacer-H_{N}/A fusion ORF (SEQ ID NO:70) for expression as a protein of the sequence illustrated in SEQ ID NO:71. The fusion protein is termed CPOP-A. FIG. 24 illustrates the purification of CPOP-A from E. coli following the methods used in Example 9.

### Example 27

### Preparation and Assessment of an LC/A-nociceptin Variant Mutant-H_{N}/A Fusion Protein

[0624] Due to the single amino acid modification necessary to mutate the nociceptin sequence at position 1 from a Phe to a Tyr, the LC/A-nociceptin variant mutant-H_{N}/A fusion is created by site directed mutagenesis (for example using Quickchange (Stratagene Inc.)), using the LC/A-nociceptin variant-H_{N}/A fusion (SEQ ID NO:25) as a template. Oligonucleotides are designed encoding tyrosine at position 1 of the nociceptin sequence, ensuring standard E. coli codon usage is maintained and no additional restriction sites are incorporated, flanked by sequences complimentary to the linker region of the LC/A-nociceptin variant-H_{N}/A fusion (SEQ ID NO:25) either side on the nociceptin section. The SDM product is checked by sequencing and the final construct containing the LC/A-nociceptin mutant-spacer-H_{N}/A fusion ORF (SEQ ID NO:72) for expression as a protein of the sequence illustrated in SEQ ID NO:73. The fusion protein is termed CPOPv-A. FIG. 25 illustrates the purification of CPOPv-A from E. coli following the methods used in Example 9.

[0625] Using methodology described in Example 16, CPOPv-A is assessed for its ability to cleave SNAP-25 in the eDRG cell model. FIG. 26 illustrates that CPOPv-A is able to cleave SNAP-25 in the eDRG model, achieving cleavage of 50% of the maximal SNAP-25 after exposure of the cells to approximately 5.9 nM fusion for 24 h.

### Example 28

### Preparation of an IgA Protease-Nociceptin Variant-H_{N}/A Fusion Protein

[0626] The IgA protease amino acid sequence was obtained from freely available database sources such as GenBank (accession number P09790). Information regarding the structure of the N. Gonorrhoeae IgA protease gene is available in the literature (Pohlner et al., Gene structure and extracellular secretion of Neisseria gonorrhoeae IgA protease, Nature, 1987, 325(6103), 458-62). Using Backtranslation tool v2.0 (Entelechon), the DNA sequence encoding the IgA protease modified for E. coli expression was determined. A BamHI recognition sequence was incorporated at the 5′ end and a codon encoding a cysteine amino acid and SalI recognition sequence were incorporated at the 3′ end of the IgA DNA. The DNA sequence was screened using MapDraw, (DNASTAR Inc.) for restriction enzyme cleavage sequences incorporated during the back translation. Any cleavage sequences that are found to be common to those required for cloning were removed manually from the proposed coding sequence ensuring common E. coli codon usage is maintained. E. coli codon usage was assessed Graphical Codon Usage Analyser (Geneart), and the % GC content and codon usage ratio assessed by reference to published codon usage tables. This optimised DNA sequence (SEQ ID NO:74) containing the IgA open reading frame (ORF) is then commercially synthesized.

[0627] The IgA (SEQ ID NO:74) is inserted into the LC-linker-nociceptin variant-spacer-H_{N} ORF (SEQ ID NO:25) using BamHI and SalI restriction enzymes to replace the LC with the IgA protease DNA. The final construct contains the IgA-linker-nociceptin variant-spacer-H_{N} ORF (SEQ ID NO:75) for expression as a protein of the sequence illustrated in SEQ ID NO:76.

### Example 29

### Preparation and Assessment of a Nociceptin Targeted Endopeptidase Fusion Protein with a Removable Histidine Purification Tag

[0628] DNA was prepared that encoded a Factor Xa removable his-tag (his6), although it is clear that alternative proteases site such as Enterokinase and alternative purification tags such as longer histidine tags are also possible. Using one of a variety of reverse translation software tools (for example EditSeq best E. coli reverse translation (DNASTAR Inc.), or Backtranslation tool v2.0 (Entelechon)), the DNA sequence encoding the Factor Xa removable his-tag region is determined. Restriction sites are then incorporated into the DNA sequence and can be arranged as NheI-linker-SpeI-PstI-H_{N}/A-XbaI-LEIEGRSGHHHHHHStop codon-HindIII (SEQ ID NO:77). The DNA sequence is screened for restriction sequence incorporated and any additional sequences are removed manually from the remaining sequence ensuring common E. coli codon usage is maintained. E. coli codon usage is assessed by reference to software programs such as Graphical Codon Usage Analyser (Geneart), and the % GC content and codon usage ratio assessed by reference to published codon usage tables (for example GenBank Release 143, 13 Sep. 2004). This optimised DNA sequence is then commercially synthesized (for example by Entelechon, Geneart or Sigma-Genosys) and is provided in the pCR 4 vector. In order to create CPNv-A-FXa-HT (SEQ ID NO:78, removable his-tag construct) the pCR 4 vector encoding the removable his-tag is cleaved with NheI and HindIII. The NheI-HindIII fragment is then inserted into the LC/A-CPNv-H_{N}/A vector (SEQ ID NO:25) that has also been cleaved by NheI and HindIII. The final construct contains the LC/A-linker-nociceptin variant-spacer-H_{N}-FXa-Histag-HindIII ORF sequences (SEQ ID NO:78) for expression as a protein of the sequence illustrated in SEQ ID NO:79. FIG. 27 illustrates the purification of CPNv-A-FXa-HT from E. coli following the methods used in Example 9.

### Example 30

### Preparation of a Leu-Enkephalin Targeted Endopeptidase Fusion Protein Containing a Translocation Domain Derived From Diphtheria Toxin

[0629] The DNA sequence is designed by back translation of the amino acid sequence of the translocation domain of the diphtheria toxin (obtained from freely available database sources such as GenBank (accession number 1×DTT) using one of a variety of reverse translation software tools (for example EditSeq best E. coli reverse translation (DNASTAR Inc.), or Backtranslation tool v2.0 (Entelechon)). Restriction sites are then incorporated into the DNA sequence and can be arranged as NheI-Linker-SpeI-PstI-diphtheria translocation domain-XbaI-stop codon-HindIII (SEQ ID NO:80). PstI/XbaI recognition sequences are incorporated at the 5′ and 3′ ends of the translocation domain respectively of the sequence maintaining the correct reading frame. The DNA sequence is screened (using software such as MapDraw, DNASTAR Inc.) for restriction enzyme cleavage sequences incorporated during the back translation. Any cleavage sequences that are found to be common to those required by the cloning system are removed manually from the proposed coding sequence ensuring common E. coli codon usage is maintained. E. coli codon usage is assessed by reference to software programs such as Graphical Codon Usage Analyser (Geneart), and the % GC content and codon usage ratio assessed by reference to published codon usage tables (for example GenBank Release 143, 13 Sep. 2004). This optimised DNA sequence containing the diphtheria translocation domain is then commercially synthesized as NheI-Linker-SpeI-PstI-diphtheria translocation domain-XbaI-stop codon-HindIII (for example by Entelechon, Geneart or Sigma-Genosys) and is provided in the pCR 4 vector (Invitrogen). The pCR 4 vector encoding the diphtheria translocation domain is cleaved with NheI and XbaI. The NheI-XbaI fragment is then inserted into the LC/A-CPLE-H_{N}/A vector (SEQ ID NO:68) that has also been cleaved by NheI and XbaI. The final construct contains the LC/A-leu-enkephalin-spacer-diphtheria translocation domain ORF sequences (SEQ ID NO:81) for expression as a protein of the sequence illustrated in SEQ ID NO:82.

### Example 31

### Preparation of a Nociceptin Variant Targeted Endopeptidase Fusion Protein Containing an LC Domain Derived from Tetanus Toxin

[0630] The DNA sequence is designed by back translation of the tetanus toxin LC amino acid sequence (obtained from freely available database sources such as GenBank (accession number X04436) using one of a variety of reverse translation software tools (for example EditSeq best E. coli reverse translation (DNASTAR Inc.), or Backtranslation tool v2.0 (Entelechon)). BamHI/SalI recognition sequences are incorporated at the 5′ and 3′ ends respectively of the sequence maintaining the correct reading frame (SEQ ID NO:83). The DNA sequence is screened (using software such as MapDraw, DNASTAR Inc.) for restriction enzyme cleavage sequences incorporated during the back translation. Any cleavage sequences that are found to be common to those required by the cloning system are removed manually from the proposed coding sequence ensuring common E. coli codon usage is maintained. E. coli codon usage is assessed by reference to software programs such as Graphical Codon Usage Analyser (Geneart), and the % GC content and codon usage ratio assessed by reference to published codon usage tables (for example GenBank Release 143, 13 Sep. 2004). This optimised DNA sequence containing the tetanus toxin LC open reading frame (ORF) is then commercially synthesized (for example by Entelechon, Geneart or Sigma-Genosys) and is provided in the pCR 4 vector (Invitrogen). The pCR 4 vector encoding the TeNT LC is cleaved with BamHI and SalI. The BamHI-SalI fragment is then inserted into the LC/A-CPNv-H_{N}/A vector (SEQ ID NO:25) that has also been cleaved by BamHI and SalI. The final construct contains the TeNT LC-linker-nociceptin variant-spacer-H_{N} ORF sequences (SEQ ID NO:84) for expression as a protein of the sequence illustrated in SEQ ID NO:85.

### Example 32

### Preparation of an LC/C-nociceptin Variant-H_{N}/C Fusion Protein with a Native Serotype C Linker that Is Susceptible to Factor Xa Cleavage

[0631] Following the methods used in Example 4, the LC/C (SEQ ID NO:5) and H_{N}/C (SEQ ID NO:6) are created and inserted into the C serotype nociceptin variant linker arranged as BamHI-SalI-linker-nociceptin variant-NheI-spacer-SpeI-PstI-XbaI-stop codon-HindIII (SEQ ID NO:86). The final construct contains the LC-linker-nociceptin variant-spacer-H_{N} ORF sequences (SEQ ID NO:87) for expression as a protein of the sequence illustrated in SEQ ID NO:88. The fusion protein is termed CPNv-C (act. C).

### Example 33

### Construction of CHO-K1 OP₂ Receptor Activation Assay and SNAP-25 Cleavage Assay

### Cell-Line Creation

[0632] CHO OP₂ cell line was purchased from Perkin Elmer (ES-541-C, lot 451-719-A). Cells were transfected with SNAP-25 DNA using Lipofectamine™ 2000 and incubated for 4 hours before media replacement. After 24 hours, cells were transferred to a T175 flask. 100 μg/ml Zeocin was added after a further 24 hours to begin selection of SNAP-25 expressing cells, and 5 μg/ml Blasticidin added to maintain selective pressure for the receptor. Cells were maintained in media containing selection agents for two weeks, passaging cells every two to three days to maintain 30-70% confluence. Cells were then diluted in selective media to achieve 0.5 cell per well in a 96 well microplate. After a few days, the plates were examined under a microscope, and those containing single colonies were marked. Media in these wells was changed weekly. As cells became confluent in the wells, they were transferred to T25 flasks. When they had expanded sufficiently each clone was seeded to 24 wells of a 96 well plate, plus a frozen stock vial created. LC/A-CPDY-H_{N}A fusion and LC/A-H_{N}A were applied to the cells for 24 hours, and then Western blots performed to detect SNAP-25 cleavage. Clones from which SNAP-25 bands were strong and cleavage levels were high with fusion were maintained for further investigation. Full dose curves were run on these, and the clone (D30) with the highest differential between LC/A-CPDY-H_{N}A fusion and LC/A-H_{N}A cleavage levels was selected.

### OP₂ Receptor Activation Assay

[0633] The OP₂ receptor activation measures the potency and intrinsic efficacy of ligands at OP₂ receptor in transfected CHO-K1 cells by quantifying the reduction of forskolin-stimulated intracellular cAMP using a FRET-based cAMP (Perkin Elmer LANCE cAMP kit). After stimulation, a fluorescently labelled cAMP tracer (Europium-streptavadin/biotin-cAMP) and fluorescently (Alexa) labelled anti-cAMP antibody are added to the cells in a lysis buffer. cAMP from the cells competes with the cAMP tracer for antibody binding sites. When read, a light pulse at 320 nm excites the fluorescent portion (Europium) of the cAMP tracer. The energy emitted from the europium is transferred to the Alexa fluor-labelled antibodies bound to the tracer, generating a TR-FRET signal at 665 nm (Time-resolved fluorescence resonance energy transfer is based on the proximity of the donor label, europium, and the acceptor label, Alexa fluor, which have been brought together by a specific binding reaction). Residual energy from the europium produces light at 615 nm. In agonist treated cells there will be less cAMP to compete with the tracer so a dose dependant increase in signal at 665 nm will be observed compared with samples treated with forskolin alone. The signal at 665 nm signal is converted to cAMP concentration by interpolation to a cAMP standard curve which is included in each experiment.

### Culture of Cells for Receptor Activation Assay

[0634] Cells were seeded and cultured in T175 flasks containing Ham F12 with Glutamax, 10% Foetal bovine serum, 5 μg ml-1 Blasticidin and 100 μg ml-1 Zeocin. The flasks were incubated at 37° C. in a humidified environment containing 5% CO₂ until 60-80% confluent. On the day of harvest the media was removed and the cells washed twice with 25 ml PBS. The cells were removed from the flask by addition of 10 ml of TrypLE™ Express, and incubation at 37° C. for 10 min followed by gentle tapping of the flask. The dislodged cells were transferred to a 50 ml centrifuge tube and the flask washed twice with 10 ml media which was added to the cell suspension. The tube was centrifuged at 1300×g for 3 min and the supernatant removed. Cells were gently re-suspended in 10 ml media (if freezing cells) or assay buffer (if using ‘fresh’ cells in assay), and a sample was removed for counting using a nucleocounter (ChemoMetec). Cells for use ‘fresh’ in an assay were diluted further in assay buffer to the appropriate concentration. Cells harvested for freezing were re-centrifuged (1300×g; 3 min), the supernatant removed and cells re-suspended in Synth-a-freeze at 4° C. to 3×10⁶ cells/ml. Cryovials containing 1 ml suspension each were placed in a chilled Nalgene Mr Frosty freezing container (−1° C./minute cooling rate), and left overnight in a −80° C. freezer. The following day vials were transferred to the vapour phase of a liquid nitrogen storage tank.

### Dilution of Test Materials and Cell Assay

[0635] Using Gilson pipettes and Sigmacote® or lo-bind tips, test materials and standards were diluted to the appropriate concentrations in the wells of the first two columns of an eppendorf 500 μl deep-well lo-bind plate, in assay buffer containing 10 μM forskolin. The chosen concentrations in columns one and two were half a log unit apart. From these, serial 1:10 dilutions were made across the plate (using an electronic eight channel pipette with Sigmacote® or lo-bind tips) until eleven concentrations at half log intervals had been created. In the twelfth column, assay buffer only was added as a ‘basal’. Using a 12 channel digital pipette, 10 μl of sample from the lo-bind plate was transferred to the optiplate 96 well microplate.

[0636] To wells containing the standard curve, 10 μl of assay buffer was added using a multichannel digital pipette. To wells containing the test materials, 10 μl of cells in assay buffer at the appropriate concentration were added. Plates were sealed and incubated for 120 min at room temperature, for the first hour on an IKA MTS 2/4 orbital shaker set to maximum speed.

### Detection

[0637] LANCE® Eu-W8044 labeled streptavidin (Eu-SA) and Biotin-cAMP (b-cAMP) were diluted in cAMP Detection Buffer (both from Perkin Elmer LANCE® cAMP kit) to create sub-stocks, at dilution ratios of 1:17 and 1:5, respectively. The final detection mix was prepared by diluting from the two sub stocks into detection buffer at a ratio of 1:125. The mixture was incubated for 15-30 min at room temperature before addition of 1:200 Alexa Fluor® 647-anti cAMP Antibody (Alexa-Fluor Ab). After briefly vortex mixing, 20 μl was immediately added to each well using a digital multichannel pipette. Microplate sealers were applied and plates incubated for 24 h at room temperature (for the first hour on an IKA MTS 2/4 orbital shaker set to maximum speed). Plate sealers were removed prior to reading on the Envision.

[0638] FIGS. 33 and 34 show that dynorphin conjugates with LC/A-H_{N}/A, LC/B-H_{N}/B, LC/C-H_{N}/C and LC/D-H_{N}/D backbones active the OP₂ receptor.

### CHO-K1 OP2 SNAP-25 Cleavage Assay

[0639] Cultures of cells were exposed to varying concentrations of fusion protein for 24 hours. Cellular proteins were separated by SDS-PAGE and Western blotted with anti-SNAP-25 antibody to facilitate assessment of SNAP-25 cleavage. SNAP-25 cleavage calculated by densitometric analysis (Syngene).

### Plating Cells

[0640] Prepare cells at 2×10⁵ cells/ml and seed 125 μl per well of 96 well plate. Use the following media: 500 ml Gibco Ham F12 with Glutamax® (product code 31765068), 50 ml FBS, 5 μg/ml Blasticidin (250 μl aliquot from box in freezer, G13) (Calbiochem #203351, 10 ml at 10 mg/ml), 100 μg/ml Zeocin (500 μl from box in freezer, G35). (Invitrogen from Fisher, 1 g in 8×1.25 ml tubes at 100 mg/ml product code VXR25001). Allow cells to grow for 24 hrs (37° C., 5% CO₂, humidified atmosphere).

### Cell Treatment

[0641] Prepare dilutions of test protein for a dose range of each test proteins (make up double (2×) the desired final concentrations because 125 μl will be applied directly onto 125 μl of media already in each well). Filter sterilize CHO KOR D30 feeding medium (20 ml syringe, 0.2 μm syringe filter) to make the dilutions. Add the filtered medium into 5 labelled bijoux's (7 ml tubes), 0.9 ml each using a Gilson pipette or multi-stepper. Dilute the stock test protein to 2000 nM (working stock solution 1) and 600 nM (working stock solution 2). Using a Gilson pipette prepare 10-fold serial dilutions of each working stock, by adding 100 μl to the next concentration in the series. Pipette up and down to mix thoroughly. Repeat to obtain 4 serial dilutions for solution 1, and 3 serial dilutions for solution 2. A 0 nM control (filtered feeding medium only) should also be prepared as a negative control for each plate. Repeat the above for each test protein. In each experiment a ‘standard’ batch of material must be included as control/reference material, this is unliganded LC/A-H_{N}/A.

### Apply Diluted Sample to CHO KOR D30 Plates

[0642] Apply 125 μl of test sample (double concentration) per well. Each test sample should be applied to triplicate wells and each dose range should include a 0 nM control. Incubate for 24 hrs (37° C., 5% CO₂, humidified atmosphere).

### Cell Lysis

[0643] Prepare fresh lysis buffer (20 mls per plate) with 25% (4×) NuPAGE® LDS sample buffer, 65% dH₂O and 10% 1 M DTT. Remove medium from the CHO KOR D30 plate by inverting over a waste receptacle. Drain the remaining media from each well using a fine-tipped pipette. Lyse the cells by adding 125 μl of lysis buffer per well using a multi-stepper pipette. After a minimum of 20 mins, remove the buffer from each well to a 1.5 ml microcentrifuge tube. Tubes must be numbered to allowing tracking of the CHO KOR treatments throughout the blotting procedure. A1-A3 down to H1-H3 numbered 1-24, A4-A6 down to H4-H6 numbered 25-48, A7-A9 down to H7-H93 numbered 49-72, A10-A12 down to H10-H12 numbered 73-96. Vortex each sample and heat at 90° C. for 5-10 mins in a prewarmed heat block. Store at −20° C. or use on the same day on an SDS gel.

### Gel Electrophoresis

[0644] If the sample has been stored o/n or longer, put in a heat block prewarmed to 90° C. for 5-10 mins. Set up SDS page gels, use 1 gel per 12 samples, prepare running buffer (1×, Invitrogen NuPAGE® MOPS SDS Running Buffer (20×) (NP0001)) approximately 800 ml/gel tank. Add 500 μl of NuPAGE® antioxidant to the upper buffer chamber. Load 15 μl samples onto gel lanes from left to right as and load 2.5 μl of Invitrogen Magic Marker XP and 5 μl Invitrogen See Blue Plus 2 pre-stained standard and 15 μl of non-treated control. It is important to maximize the resolution of separation during SDS PAGE. This can be achieved by running 12% bis-tris gels at 200 V for 1 hour and 25 minutes (until the pink (17 kDa) marker reaches the bottom of the tank).

### Western Blotting

[0645] Complete a Semi-dry transfer: using an Invitrogen iBlot® (use iBlot Programme 3 for 6 minutes). Put the nitrocellulose membranes in individual small trays. Incubate the membranes with blocking buffer solution (5 g Marvel® milk powder per 100 ml 0.1% PBS/Tween) at room temperature, on a rocker, for 1 hour. Apply primary antibody (Anti-SNAP-25 1:1000 dilution) and incubate the membranes with primary antibody (diluted in blocking buffer) for 1 hour on a rocker at room temperature. Wash the membranes by rinsing 3 times with PBS/Tween (0.1%). Then apply the secondary (Anti-Rabbit-HRP conjugate diluted 1:1000) and incubate the membranes with secondary antibody (diluted in blocking buffer) at room temperature, on a rocker, for 1 hour. Wash the membranes by rinsing 3 times with PBS/Tween (0.1%), leave membrane a minimum of 20 mins for the last wash. Detect the bound antibody using Syngene: Drain blots of PBS/Tween, mix WestDura reagents 1:1 and add to blots for 5 minutes. Ensure enough solution is added to the membranes to completely cover them. Place membrane in Syngene tray, set up Syngene software for 5 min expose time.

[0646] FIG. 31 clearly shows that LC/A-CPDY-H_{N}/A conjugates effectively cleave SNAP-25.

### Example 34

### Construction and Activation of Dynorphin Fusion Proteins

### Preparation of a LC/A and H_{N}/A Backbone Clones

[0647] The following procedure creates the LC and H_{N} fragments for use as the component backbone for multidomain fusion expression. This example is based on preparation of a serotype A based clone (SEQ ID NO:1 and SEQ ID NO:2), though the procedures and methods are equally applicable to the other serotypes (illustrated by the sequence listing for serotype B (SEQ ID NO:3 and SEQ ID NO:4) and serotype C (SEQ ID NO:5 and SEQ ID NO:6)).

### Preparation of Cloning and Expression Vectors

[0648] pCR 4 (Invitrogen) is the chosen standard cloning vector, selected due to the lack of restriction sequences within the vector and adjacent sequencing primer sites for easy construct confirmation. The expression vector is based on the pMAL (NEB) expression vector, which has the desired restriction sequences within the multiple cloning site in the correct orientation for construct insertion (BamHI-SalI-PstI-HindIII). A fragment of the expression vector has been removed to create a non-mobilisable plasmid and a variety of different fusion tags have been inserted to increase purification options.

### Preparation of Protease (e.g., LC/A) Insert

[0649] The LC/A (SEQ ID NO:1) is created by one of two ways:

[0650] The DNA sequence is designed by back translation of the LC/A amino acid sequence (obtained from freely available database sources such as GenBank (accession number P10845) or Swissprot (accession locus BXA1_CLOBO) using one of a variety of reverse translation software tools (for example EditSeq best E. coli reverse translation (DNASTAR Inc.), or Backtranslation tool v2.0 (Entelechon)). BamHI/SalI recognition sequences are incorporated at the 5′ and 3′ ends respectively of the sequence, maintaining the correct reading frame. The DNA sequence is screened (using software such as MapDraw, DNASTAR Inc.) for restriction enzyme cleavage sequences incorporated during the back translation. Any cleavage sequences that are found to be common to those required by the cloning system are removed manually from the proposed coding sequence ensuring common E. coli codon usage is maintained. E. coli codon usage is assessed by reference to software programs such as Graphical Codon Usage Analyser (Geneart), and the % GC content and codon usage ratio assessed by reference to published codon usage tables (for example GenBank Release 143, 13 Sep. 2004). This optimised DNA sequence containing the LC/A open reading frame (ORF) is then commercially synthesized (for example by Entelechon, Geneart or Sigma-Genosys) and is provided in the pCR 4 vector.

[0651] The alternative method is to use PCR amplification from an existing DNA sequence with BamHI and SalI restriction enzyme sequences incorporated into the 5′ and 3′ PCR primers respectively. Complementary oligonucleotide primers are chemically synthesised by a supplier (for example MWG or Sigma-Genosys), so that each pair has the ability to hybridize to the opposite strands (3′ ends pointing “towards” each other) flanking the stretch of Clostridium target DNA, one oligonucleotide for each of the two DNA strands. To generate a PCR product the pair of short oligonucleotide primers specific for the Clostridium DNA sequence are mixed with the Clostridium DNA template and other reaction components and placed in a machine (the ‘PCR machine’) that can change the incubation temperature of the reaction tube automatically, cycling between approximately 94° C. (for denaturation), 55° C. (for oligonucleotide annealing), and 72° C. (for synthesis). Other reagents required for amplification of a PCR product include a DNA polymerase (such as Taq or Pfu polymerase), each of the four nucleotide dNTP building blocks of DNA in equimolar amounts (50-200 μM) and a buffer appropriate for the enzyme optimised for Mg²⁺ concentration (0.5-5 mM).

[0652] The amplification product is cloned into pCR 4 using either, TOPO® TA cloning for Taq PCR products or Zero Blunt® TOPO® cloning for Pfu PCR products (both kits commercially available from Invitrogen). The resultant clone is checked by sequencing. Any additional restriction sequences which are not compatible with the cloning system are then removed using site directed mutagenesis (for example, using Quickchange® (Stratagene Inc.)).

### Preparation of Translocation (e.g., H_{N}) Insert

[0653] The H_{N}/A (SEQ ID NO:2) is created by one of two ways:

[0654] The DNA sequence is designed by back translation of the H_{N}/A amino acid sequence (obtained from freely available database sources such as GenBank (accession number P10845) or Swissprot (accession locus BXA1_CLOBO)) using one of a variety of reverse translation software tools (for example EditSeq best E. coli reverse translation (DNASTAR Inc.), or Backtranslation tool v2.0 (Entelechon)). A PstI restriction sequence added to the N-terminus and XbaI-stop codon-HindIII to the C-terminus ensuring the correct reading frame is maintained. The DNA sequence is screened (using software such as MapDraw, DNASTAR Inc.) for restriction enzyme cleavage sequences incorporated during the back translation. Any sequences that are found to be common to those required by the cloning system are removed manually from the proposed coding sequence ensuring common E. coli codon usage is maintained. E. coli codon usage is assessed by reference to software programs such as Graphical Codon Usage Analyser (Geneart), and the % GC content and codon usage ratio assessed by reference to published codon usage tables (for example GenBank Release 143, 13 Sep. 2004). This optimised DNA sequence is then commercially synthesized (for example by Entelechon, Geneart or Sigma-Genosys) and is provided in the pCR 4 vector.

[0655] The alternative method is to use PCR amplification from an existing DNA sequence with PstI and XbaI-stop codon-HindIII restriction enzyme sequences incorporated into the 5′ and 3′ PCR primers respectively. The PCR amplification is performed as described above. The PCR product is inserted into pCR 4 vector and checked by sequencing. Any additional restriction sequences which are not compatible with the cloning system are then removed using site directed mutagenesis (for example using Quickchange® (Stratagene Inc.)).

### Preparation of Linker-Dynorphin-Spacer Insert

[0656] The LC-H_{N} linker can be designed from first principle, using the existing sequence information for the linker as the template. For example, the serotype A linker (in this case defined as the inter-domain polypeptide region that exists between the cysteines of the disulphide bridge between LC and H_{N}) is 23 amino acids long and has the sequence VRGIITSKTKSLDKGYNKALNDL. Within this sequence, it is understood that proteolytic activation in nature leads to an H_{N} domain that has an N-terminus of the sequence ALNDL. This sequence information is freely available from available database sources such as GenBank (accession number P10845) or Swissprot (accession locus BXA1_CLOBO). Into this linker an enterokinase site, dynorphin and spacer are incorporated; and using one of a variety of reverse translation software tools (for example EditSeq best E. coli reverse translation (DNASTAR Inc.), or Backtranslation tool v2.0 (Entelechon)), the DNA sequence encoding the linker-ligand-spacer region is determined. Restriction sites are then incorporated into the DNA sequence and can be arranged as BamHI-SalI-linker-protease site-dynorphin-NheI-spacer-SpeI-PstI-XbaI-stop codon-HindIII. It is important to ensure the correct reading frame is maintained for the spacer, dynorphin and restriction sequences and that the XbaI sequence is not preceded by the bases, TC, which would result on DAM methylation. The DNA sequence is screened for restriction sequence incorporation, and any additional sequences are removed manually from the remaining sequence ensuring common E. coli codon usage is maintained. E. coli codon usage is assessed by reference to software programs such as Graphical Codon Usage Analyser (Geneart), and the % GC content and codon usage ratio assessed by reference to published codon usage tables (for example, GenBank Release 143, 13 Sep. 2004). This optimised DNA sequence is then commercially synthesized (for example by Entelechon, Geneart or Sigma-Genosys) and is provided in the pCR 4 vector.

### Preparation of the LC/A-dynorphin-H_{N}/A Fusion

[0657] In order to create the LC-linker-dynorphin-spacer-H_{N} construct (SEQ ID NO:90), the pCR 4 vector encoding the linker-dynorphin-spacer is cleaved with BamHI+SalI restriction enzymes. This cleaved vector then serves as the recipient vector for insertion and ligation of the LC/A DNA (SEQ ID NO:1) cleaved with BamHI+SalI. The resulting plasmid DNA is then cleaved with PstI+XbaI restriction enzymes and serves as the recipient vector for the insertion and ligation of the H_{N}/A DNA (SEQ ID NO:2) cleaved with PstI+XbaI. The final construct contains the LC-linker-dynorphin-spacer-H_{N} ORF (SEQ ID NO:90) for transfer into expression vectors for expression to result in a fusion protein of the sequence illustrated in SEQ ID NO:91.

### Examples 35

### Preparation and Purification of an LC/A-dynorphin-H_{N}/A Fusion Protein Family with Variable Spacer Length

[0658] Using the same strategy as employed in Example 34, a range of DNA linkers were prepared that encoded dynorphin and variable spacer content. Using one of a variety of reverse translation software tools (for example EditSeq best E. coli reverse translation (DNASTAR Inc.), or Backtranslation tool v2.0 (Entelechon)), the DNA sequence encoding the linker-ligand-spacer region is determined. Restriction sites are then incorporated into the DNA sequence and can be arranged as BamHI-SalI-linker-protease site-dynorphin-NheI-spacer-SpeI-PstI-XbaI-stop codon-HindIII. It is important to ensure the correct reading frame is maintained for the spacer, dynorphin and restriction sequences and that the XbaI sequence is not preceded by the bases, TC which would result on DAM methylation. The DNA sequence is screened for restriction sequence incorporation and any additional sequences are removed manually from the remaining sequence ensuring common E. coli codon usage is maintained. E. coli codon usage is assessed by reference to software programs such as Graphical Codon Usage Analyser (Geneart), and the % GC content and codon usage ratio assessed by reference to published codon usage tables (for example GenBank Release 143, 13 Sep. 2004). This optimised DNA sequence is then commercially synthesized (for example by Entelechon, Geneart or Sigma-Genosys) and is provided in the pCR 4 vector.

[0659] The spacers that were created included:

| | | SEQ ID NO |
|---|---|---|
| | | of the |
| | | linker |
| Code | Protein sequence of the linker | DNA |
| GS10 | ALAGGGGSALVLQ | 92 |
| GS15 | ALAGGGGSGGGGSALVLQ | 93 |
| GS25 | ALAGGGGSGGGGSGGGGSGGGGSALVLQ | 94 |
| GS30 | ALAGGGGSGGGGSGGGGSGGGGSGGGGSALV | 98 |
| Hx27 | ALAAEAAAKEAAAKEAAAKAGGGGSALV | 99 |

[0660] By way of example, in order to create the LC/A-CPDY(GS25)-H_{N}/A fusion construct (SEQ ID NO:94), the pCR 4 vector encoding the linker is cleaved with BamHI+SalI restriction enzymes. This cleaved vector then serves as the recipient vector for insertion and ligation of the LC/A DNA (SEQ ID NO:1) also cleaved with BamHI+SalI. The resulting plasmid DNA is then cleaved with BamHI+HindIII restriction enzymes and the LC/A-linker fragment inserted into a similarly cleaved vector containing a unique multiple cloning site for BamHI, SalI, PstI, and HindIII such as the pMAL vector (NEB). The H_{N}/A DNA (SEQ ID NO:2) is then cleaved with PstI+HindIII restriction enzymes and inserted into the similarly cleaved pMAL-LC/A-linker construct. The final construct contains the LC/A-CPDY(GS25)-H_{N}/A ORF for expression as a protein of the sequence illustrated in SEQ ID NO:94.

### Example 36

### Purification Method for LC/A-dynorphin-H_{N}/A Fusion Protein

[0661] Defrost falcon tube containing 25 ml 50 mM HEPES pH 7.2, 200 mM NaCl and approximately 10 g of E. coli BL21 cell paste. Make the thawed cell paste up to 80 ml with 50 mM HEPES pH 7.2, 200 mM NaCl and sonicate on ice 30 seconds on, 30 seconds off for 10 cycles at a power of 22 microns ensuring the sample remains cool. Spin the lysed cells at 18 000 rpm, 4° C. for 30 minutes. Load the supernatant onto a 0.1 M NiSO₄ charged Chelating column (20-30 ml column is sufficient) equilibrated with 50 mM HEPES pH 7.2, 200 mM NaCl. Using a step gradient of 10 and 40 mM imidazol, wash away the non-specific bound protein and elute the fusion protein with 100 mM imidazol. Dialyse the eluted fusion protein against 5 L of 50 mM HEPES pH 7.2, 200 mM NaCl at 4° C. overnight and measure the OD of the dialysed fusion protein. Add 3.2 μl of enterokinase (2 μg/ml) per 1 mg fusion protein and Incubate at 25° C. static overnight. Load onto a 0.1 M NiSO₄ charged Chelating column (20-30 ml column is sufficient) equilibrated with 50 mM HEPES pH 7.2, 200 mM NaCl. Wash column to baseline with 50 mM HEPES pH 7.2, 200 mM NaCl. Using a step gradient of 10 and 40 mM imidazol, wash away the non-specific bound protein and elute the fusion protein with 100 mM imidazol. Dialyse the eluted fusion protein against 5 L of 50 mM HEPES pH 7.2, 200 mM NaCl at 4° C. overnight and concentrate the fusion to about 2 mg/ml, aliquot sample and freeze at −20° C. Test purified protein using OD, BCA, purity analysis and SNAP-25 assessments.

### Example 37

### Preparation of an LC/C-dynorphin-H_{N}/C FUSION Protein with a Serotype A Activation Sequence

[0662] Following the methods used in Examples 1 and 2, the LC/C (SEQ ID NO:5) and H_{N}/C (SEQ ID NO:6) are created and inserted into the A serotype linker arranged as BamHI-SalI-linker-protease site-dynorphin-NheI-spacer-SpeI-PstI-XbaI-stop codon-HindIII. The final construct contains the LC-linker-dynorphin-spacer-H_{N} ORF for expression as a protein of the sequence illustrated in SEQ ID NO:95.

### Example 38

### Preparation of an IGA Protease-Dynorphin Variant-H_{N}/A Fusion Protein

[0663] The IgA protease amino acid sequence was obtained from freely available database sources such as GenBank (accession number P09790). Information regarding the structure of the N. Gonorrhoeae IgA protease gene is available in the literature (Pohlner et al., Gene structure and extracellular secretion of Neisseria gonorrhoeae IgA protease, Nature, 1987, 325(6103), 458-62). Using Backtranslation tool v2.0 (Entelechon), the DNA sequence encoding the IgA protease modified for E. coli expression was determined. A BamHI recognition sequence was incorporated at the 5′ end and a codon encoding a cysteine amino acid and SalI recognition sequence were incorporated at the 3′ end of the IgA DNA. The DNA sequence was screened using MapDraw, (DNASTAR Inc.) for restriction enzyme cleavage sequences incorporated during the back translation. Any cleavage sequences that are found to be common to those required for cloning were removed manually from the proposed coding sequence ensuring common E. coli codon usage is maintained. E. coli codon usage was assessed Graphical Codon Usage Analyser (Geneart), and the % GC content and codon usage ratio assessed by reference to published codon usage tables. This optimised DNA sequence (SEQ ID NO:74) containing the IgA open reading frame (ORF) is then commercially synthesized.

[0664] The IgA (SEQ ID NO:74) is inserted into the LC-linker-dynorphin-spacer-H_{N} ORF (SEQ ID NO:90) using BamHI and SalI restriction enzymes to replace the LC with the IgA protease DNA. The final construct contains the IgA-linker-dynorphin-spacer-H_{N} ORF for expression as a protein of the sequence illustrated in SEQ ID NO:96.

### Example 39

### Preparation of a Dynorphin Targeted Endopeptidase Fusion Protein Containing an LC Domain Derived from Tetanus Toxin

[0665] The DNA sequence is designed by back translation of the tetanus toxin LC amino acid sequence (obtained from freely available database sources such as GenBank (accession number X04436) using one of a variety of reverse translation software tools [for example EditSeq best E. coli reverse translation (DNASTAR Inc.), or Backtranslation tool v2.0 (Entelechon)]. BamHI/SalI recognition sequences are incorporated at the 5′ and 3′ ends respectively of the sequence maintaining the correct reading frame (SEQ ID NO:83). The DNA sequence is screened (using software such as MapDraw, DNASTAR Inc.) for restriction enzyme cleavage sequences incorporated during the back translation. Any cleavage sequences that are found to be common to those required by the cloning system are removed manually from the proposed coding sequence ensuring common E. coli codon usage is maintained. E. coli codon usage is assessed by reference to software programs such as Graphical Codon Usage Analyser (Geneart), and the % GC content and codon usage ratio assessed by reference to published codon usage tables (for example GenBank Release 143, 13 Sep. 2004). This optimised DNA sequence containing the tetanus toxin LC open reading frame (ORF) is then commercially synthesized (for example by Entelechon, Geneart or Sigma-Genosys) and is provided in the pCR 4 vector (Invitrogen). The pCR 4 vector encoding the TeNT LC is cleaved with BamHI and SalI. The BamHI-SalI fragment is then inserted into the LC/A-dynorphin-H_{N}/A vector (SEQ ID NO:90) that has also been cleaved by BamHI and SalI. The final construct contains the TeNT LC-linker-dynorphin-spacer-H_{N} ORF sequences for expression as a protein of the sequence illustrated in SEQ ID NO:97.

### Examples 40

### Preparation and Purification of an LC/A-dynorphin-H_{N}/A Fusion Protein Family with Variable Dynorphin Ligands

[0666] Using the same strategy as employed in Example 34, a range of DNA Dynorphin ligands were prepared that encoded various dynorphin ligands. Using one of a variety of reverse translation software tools (for example EditSeq best E. coli reverse translation (DNASTAR Inc.), or Backtranslation tool v2.0 (Entelechon)), the DNA sequence encoding the linker-ligand-spacer region is determined. Restriction sites are then incorporated into the DNA sequence and can be arranged as BamHI-SalI-linker-protease site-dynorphin ligand-NheI-spacer-SpeI-PstI-XbaI-stop codon-HindIII. It is important to ensure the correct reading frame is maintained for the spacer, dynorphin ligand and restriction sequences and that the XbaI sequence is not preceded by the bases, TC which would result on DAM methylation. The DNA sequence is screened for restriction sequence incorporation and any additional sequences are removed manually from the remaining sequence ensuring common E. coli codon usage is maintained. E. coli codon usage is assessed by reference to software programs such as Graphical Codon Usage Analyser (Geneart), and the % GC content and codon usage ratio assessed by reference to published codon usage tables (for example GenBank Release 143, 13 Sep. 2004). This optimised DNA sequence is then commercially synthesized (for example by Entelechon, Geneart or Sigma-Genosys) and is provided in the pCR 4 vector.

[0667] Alternatively, the dynorphin ligand was created by performing site-directed mutagenesis on the DNA sequence of LC/A-CPDY-HN/A fusion (SEQ ID NO:90).

[0668] The ligands that were created included:

| | | SEQ ID NO |
|---|---|---|
| | Protein sequence | of the |
| Dynorphin | of the | Dynorphin |
| Ligand | Dynorphin ligands | ligand |
| CPDY1-13 | YGGFLRRIRPKLK | 101 |
| CPDY(D15A) | YGGFLRRIRPKLKWANQ | 102 |
| CPDY(I8RP10R)1-13 | YGGFLRRIRPKLK | 106 |
| CPDY(I8RP1-RD15A) | YGGFLRRRRRKLKWANQ | 105 |
| CPDNv9 | YGGFLGARKSARKRKNQ | 107 |

[0669] By way of example, in order to create the LC/A-CPDY(D15A)-GS20-H_{N}/A fusion construct (SEQ ID NO:102), the pCR 4 vector encoding the fusion protein (SEQ ID NO:90) serves as a template for site-directed mutagenesis to mutate the aspartic acid residue at position 15 within the dynorphin ligand to alanine. A forward and reverse primer was designed and synthesised that were complementary to the template DNA apart but encoded a mismatch to incorporate the required mutation. 125 ng primers, 1 μl dNTPs, 5-50 ng template DNA, 5 μl of 10× reaction buffer and 1μ Pfu polymerase (2.5 U/μl) were added to a 50 μl reaction mixture. The PCR reaction was as follows: 95° C. for 2 min, then 24 cycles of 95° C. for 1 min, 55° C. annealing for 1 min, 68° C. final extension for 8 min, then a 4° C. hold. The DNA product was then transformed into TOP10 cells and the plasmid DNA from the resulting colonies was then purified and sequenced to confirm that the dynorphin ligand had been mutated to create a DNA construct that will give the ORF LC/A-CPDY(D15A)-GS20-H_{N}/A (SEQ ID NO:102).

Purification of Purification of an LC/A-dynorphin-H_{N}/A Fusion Protein Family with Variable Dynorphin Ligands

[0670] Defrost falcon tube containing 25 ml 50 mM HEPES pH 7.2, 200 mM NaCl and approximately 10 g of E. coli BL21 cell paste. Make the thawed cell paste up to 80 ml with 50 mM HEPES pH 7.2, 200 mM NaCl and The cell paste was then homogenised at 20,000 psi by a Constant System Homogeniser. Spin the lysed cells at 18 000 rpm, 4° C. for 30 minutes. Load the supernatant onto a 0.1 M NiSO₄ charged Chelating column (20-30 ml column is sufficient) equilibrated with 50 mM HEPES pH 7.2, 200 mM NaCl. Using a step gradient of 10 and 40 mM imidazol, wash away the non-specific bound protein and elute the fusion protein with 100 mM imidazol. Dialyse the eluted fusion protein against 5 L of 50 mM HEPES pH 7.2, 200 mM NaCl at 4° C. overnight and measure the OD of the dialysed fusion protein. Add 3.2 μl of enterokinase (2 μg/ml) per 1 mg fusion protein and Incubate at 25° C. static overnight. Activated samples were then subjected to hydrophobic interaction chromatography (HIC purification). Solid ammonium sulphate was slowly added by spatula to the activated fusion protein and stirred by a magnetic flea at room temperature to dissolve the solid. More ammonium sulphate was added once the previous addition had been dissolved and this was repeated until the concentration reached 1 M. Load onto a Phenyl sepharose 6 fast flow (20-30 ml column is sufficient) equilibrated with 50 mM HEPES pH 7.2, 1 M ammonium sulphate. The column was then washed with 50 mM HEPES pH 7.2, 1 M ammonium sulphate. Bound protein was eluted by reducing the ammonium sulphate concentration to 0.7 M, 0.5 M, 0.3 M and 0 M and collected in 10 ml fractions. Dialyse the eluted fusion protein against 10 L of 50 mM HEPES pH 7.2, 200 mM NaCl at 4° C. overnight and concentrate the fusion to about 2 mg/ml, aliquot sample and freeze at −20° C. Test purified protein using OD, BCA, purity analysis and SNAP-25 assessments.

### Examples 41

### Preparation and Purification of an LC/A-dynorphin1-13-H_{N}/A (GS30) and LC/A-dynorphin1(D 15A)-H_{N}/A (GS30) Fusion Protein

[0671] Using the constructs described in Examples 34 and Example 40, LC/A-dynorphin1-13-H_{N}/A (GS30) and LC/A-dynorphin1(D15A)-H_{N}/A (GS30) DNA encoding fusion proteins (SEQ ID NOS:104 and 103) were created by sub-cloning experiments. By way of an example, the DNA encoding LC/A-dynorphin1(D15A)-HN/A fusion protein (SEQ ID NO:102) was digested with the restriction enzymes NheI and HindIII to remove the GS20 spacer and heavy chain. DNA encoding LC/A-dynorphin-HN/A (GS30) fusion protein (SEQ ID NO:98) was also digested with NheI and HindIII to produce a GS30-H_{N}/A fragment. Vector backbone and fragment DNA was separated by running on a 1% agarose gel at 150 volts for 1 hour before the DNA was purified with a gel extraction kit. The GS30-H_{N}/A fragment was then ligated into the vector backbone of digested LC/A-dynorphin1(D15A)-H_{N}/A fusion protein (SEQ ID NO:102) to produce LC/A-dynorphin1(D15A)-H_{N}/A (GS30) fusion protein. Typical ligation reactions were set up as follows: 2 μl Vector DNA, 14 μl Insert DNA, 2 μl 10×T4 ligase buffer, 2 μl T4 ligase. Ligation reactions were left overnight at 16° C.

### Purification of LC/A-dynorphin1-13-H_{N}/A (GS30) and LC/A-dynorphin1(D15A)-H_{N}/A (GS30) Fusion Protein

[0672] The fusion proteins were purified as described in Example 40.

### Example 42

### Preparation of an LC/B-dynorphin-H_{N}/B Fusion Protein with a Serotype A Activation Sequence

[0673] Following the methods used in Examples 1 and 2, the LC/B (SEQ ID NO:3) and H_{N}/B (SEQ ID NO:4) were created and inserted into the A serotype linker arranged as BamHI-SalI-linker-protease site-dynorphin-NheI-spacer-SpeI-PstI-XbaI-stop codon-HindIII. The final construct contained the LB-linker-dynorphin-spacer-H_{N}/B ORF for expression as a protein of the sequence illustrated in SEQ ID NO:100.

### Example 43

### Construction of CHO-K1 MrgX1 Receptor Activation Ca2+ Fluorimetry Assay

### Cell-Line Culture

[0674] CHO-K1 MrgX1 Cell Line cells were purchased from Perkin Elmer (Perkin Elmer ES-740-A). Cell culture media used was F-12 HAMS+Glutamax with 10% Foetal bovine serum and 800 μg/ml Geneticin. Cells were grown in continuous culture in T500 flasks. Subconfluent cultures (70-80%) confluent were split at a ratio 1:40 every 3-4 days. Then the culture medium was removed from the cells and the cells washed twice with 30 ml PBS. Cells were then removed from the flask by addition of 30 ml of PBS-based enzyme free dissociation buffer, and incubated at 37° C. for 5 min followed by gentle tapping of the flasks to dislodge cells. Added 10-20 ml of culture media to the flasks and transferred the remaining cells to a 50 ml tube. Washed the flask with 10-20 ml culture media and added this to the cell suspension. Cells were then centrifuged at 1300 rpm for 3 min in a Heraeus megafuge 1.0 to pellet cells before removing the supernatant and resuspending the cell pellet in culture media. Cells were then diluted further with culture media to achieve a split ratio of 1:40 and transferred appropriate volume of cells to a T500 flask. The number of cells present were counted using the Nucleocounter. Cells were then pelleted by centrifugation at 1,300 rpm for 3 min in a Heraeus megafuge 1.0 and the pellet re-suspend in Bambanker freezing medium to achieve a concentration of 3×10⁶ cells/ml. After aliquoting the cell suspension into 1.8 ml Nunc cryovials, the vials were transferred to a cryo vial rack and store at −80° C. overnight before transferring the vials to the short-term liquid nitrogen store. Several cell passage numbers were frozen in liquid nitrogen for use in the assay. Maximum passage number to be used in the assay is Px+16.

### Resurrection and Plating CHO-K1-MrgX1 Cells

[0675] This assay was optimized for the use of frozen cells. Plated cells approximately 16 h before the assay performed. Removed cell vials from liquid nitrogen and thawed quickly by placing vials in a 37° C. water bath. Transferred cells to a centrifuge tube containing 10 ml growth media for each vial being resurrected. Pelleted the cells by centrifuging at 1,300 rpm for 3 min in a Heraeus megafuge 1.0. Then the cell pellet was re-suspend in 2 ml media/vial and the number of viable cells in the suspension counted using a Nucleocounter before adding media to the cell suspension to achieve a cell concentration of 1×10⁶ cells/ml. Then the cells were plated in a Corning black walled, clear-bottom, half-area plate at a density of 20,000 viable cells/well by using a Rainin E8-300 multi-channel pipette to firstly add 30 μl media to each well followed by 20 μl/well of the 1×10⁶ cells/ml cell suspension. Cells were plated 16-18 h prior to the beginning of the assay and the plates maintain under normal growth conditions in a 37° C. 5% CO₂ incubator.

### HBSS Assay Buffer Preparation

[0676] Added 1.26 mmol.L⁻¹ CaCl₂ (630 μl of 1 mol/L CaCl₂), 0.49 mmol/L MgCl₂ (245 of 1 mol/L MgCl₂), 0.4 mmol/L MgSO₄ (203 μl of 1 mol/L MgSO₄), 20 mmol/L HEPES (10 ml of 1 mol/L HEPES) to 500 ml HBSS. Adjust the pH of the HBSS buffer to pH 7.4 at room temperature using NaOH. Filter sterilise the HBSS buffer in a sterile hood. On the day of the assay, prepared a fresh stock of Probenecid at 500 mmol/L by dissolving 710 mg of Probenecid (MW: 285.36) in 5 ml of 1 mol/L NaOH. Assay buffer was made by adding the appropriate volume of 500 mmol/L Probenecid to HBSS buffer required for the assay plate (final concentration, 5 mmol/L) and the ligand dilution series (2.5 mmol/L final concentration). To the 5 mmol/L Probenecid/HBSS assay buffer added a volume of 10% BSA that gives a final concentration of 0.02% BSA. Used the same solution of 5 mmol/L Probenecid/0.02% BSA assay buffer to dilute 1 in 2 in HBSS to make a 2.5 mmol/L Probenecid/0.01% BSA solution for ligand dilution.

### Calcium-3 Dye Preparation

[0677] Added 10 ml HBSS buffer to a bottle of desiccated Ca²⁺-4 dye. Vortexed hard and transfer to a 100 ml container. Repeated this 9 times so that a total of 100 ml HBSS buffer had been added to the Ca²⁺⁻4 dye. Aliquoted the dye into 10 ml aliquots and stored at −20° C. When using a frozen aliquot, the vial was removed from −20° C. freezer and warmed in a 37° C. waterbath. After thawing the necessary number of vials of Ca²⁺-4 dye, it was diluted 1:2 with HBSS buffer to attain 0.5×Ca²⁺-4 dye.

### Dilution of Test Fusions

[0678] Prepared the source plate, containing ligand or fusion, prior to loading cells and beginning their incubation. All reference ligand concentration ranges were achieved by serial dilution in half-log 10 increments using Sigmacote® tips. The reference compound BAM (8-22) was included in every assay at a concentration range of 5×10⁻⁶ M (5 μM) to 5×10⁻¹¹ M (50 μM) (final assay concentration will be 5× lower) plus basal (1×10⁻¹⁴). Fusions to be tested were included in every assay at a concentration range of 5×10⁻⁶ M to 5×10⁻⁹ M (final assay concentration will be 5× lower).

[0679] Prepared an intermediate 50 μmol/L stock of BAM (8-22) by 1 in 10 dilution in HBSS assay buffer (2.5 mmol/L Probenecid; 0.01% BSA HBSS assay buffer) of 500 μmol/stock using lo-bind Eppendorf tubes and Gilson P20 and P100 pipettes. Then, transfer 50 μL of the 50 μmol/L intermediate stock to the first well of a 0.5 ml lo-bind 96-well plate containing 450 μL of HBSS buffer and performed the ligand dilution series creating 1:10 dilution series going down the plate.

[0680] The assay was optimized for the source plate layout in rows, therefore the source of the dilution series must be split into triplicates (minimum of 50 μL to allow FlexStation3® to transfer 25 μL) in a separate 0.5 ml lo-bind 96-well plate (×2 compounds per plate). This can be transferred directly to the FlexStation3 for ligand transfer using Sigmacote® FlexStation3® tips (Molecular Devices).

### Dye Loading of Cells

[0681] Removed culture media from the half area 96-well plates containing cells, incubated overnight using a Rainin L50 pipette, taking care not to disrupt cells. Add 50 μl of assay buffer followed by 50 μl of 0.5×Ca²⁺ dye using an electronic multichannel pipette E8-300. Incubate cells at 37° C. in 5% CO₂ for 120 min.

### FlexStation 3® Readings

[0682] The human mas-related G-protein coupled receptor member X1 belongs to the family of orphan G protein-coupled receptors. Predominantly coupled through Gαq/11, receptor activation by an agonist causes Gαq protein activation resulting in Ca²⁺ release from intracellular stores that is mediated by the target enzyme phospholipase CB. The transient increase in intracellular Ca²⁺ requires a real-time (RT), simultaneous inject-and-read system to measure Ca²⁺ flux. The FlexStation3® microplate reader with integrated fluid transfer is used in this assay for this purpose. CHO cells that express the recombinant human MrgX1 receptor are incubated with the proprietary FLIPR-Calcium-4 masking dye that minimises background signal from extracellular Ca²⁺ and makes washing cells unnecessary. The Ca²⁺-4 dye forms a complex with Ca²⁺ which fluoresces at 525 nm following excitation at 485 nm allowing signal-detection. An inhibitor of cell membrane anion exchanger, Probenecid, is included in the assay buffer to prevent outward transport or sequestration of dye molecules. Following incubation with the dye, the cell plate is loaded onto to the FlexStation3® which transfers ligands (reference agonist or fusions) from a source plate into the microplate wells containing cells. The FlexStation 3® measures the fluorescent-emission from the Calcium-4 dye and readouts are formed as calcium traces displaying the magnitude of calcium flux as a result of MrgX1 receptor activation.

### Example 44

### Construction and Activation of BAM Fusion Proteins

[0683] To construct fusions that contain BAM1-22 (SEQ ID NO:108) and BAMS-22 (SEQ ID NO:109) the preparation of a LC/A and H_{N}/A backbone clones and preparation of cloning and expression vectors are identical as those described in Example 34.

### Preparation of Linker-BAM-Spacer Insert

[0684] The LC-H_{N} linker can be designed from first principle, using the existing sequence information for the linker as the template. For example, the serotype A linker (in this case defined as the inter-domain polypeptide region that exists between the cysteines of the disulphide bridge between LC and H_{N}) is 23 amino acids long and has the sequence VRGIITSKTKSLDKGYNKALNDL. Within this sequence, it is understood that proteolytic activation in nature leads to an H_{N} domain that has an N-terminus of the sequence ALNDL. This sequence information is freely available from available database sources such as GenBank (accession number P10845) or Swissprot (accession locus BXA1_CLOBO). Into this linker an enterokinase site, BAM ligand (SEQ ID NO:108 and SEQ ID NO:109) and spacer are incorporated; and using one of a variety of reverse translation software tools [for example EditSeq best E. coli reverse translation (DNASTAR Inc.), or Backtranslation tool v2.0 (Entelechon)], the DNA sequence encoding the linker-ligand-spacer region is determined. Restriction sites are then incorporated into the DNA sequence and can be arranged as BamHI-SalI-linker-protease site-BAM(1-22) or BAM(8-22) ligand-NheI-spacer-SpeI-PstI-XbaI-stop codon-HindIII. It is important to ensure the correct reading frame is maintained for the spacer, dynorphin and restriction sequences and that the XbaI sequence is not preceded by the bases, TC, which would result on DAM methylation. The DNA sequence is screened for restriction sequence incorporation, and any additional sequences are removed manually from the remaining sequence ensuring common E. coli codon usage is maintained. E. coli codon usage is assessed by reference to software programs such as Graphical Codon Usage Analyser (Geneart), and the % GC content and codon usage ratio assessed by reference to published codon usage tables (for example, GenBank Release 143, 13 Sep. 2004). This optimised DNA sequence is then commercially synthesized (for example by Entelechon, Geneart or Sigma-Genosys) and is provided in the pCR 4 vector.

### Preparation of the LC/A-BAM(1-22)-H_{N}/A Fusion

[0685] In order to create the LC-linker-BAM(1-22)-spacer-H_{N}/A construct (SEQ ID NO:110), the pCR 4 vector encoding the linker-BAM(1-22)-spacer insert is cleaved with BamHI+SalI restriction enzymes. This cleaved vector then serves as the recipient vector for insertion and ligation of the LC/A DNA (SEQ ID NO:1) cleaved with BamHI+SalI. The resulting plasmid DNA is then cleaved with PstI+XbaI restriction enzymes and serves as the recipient vector for the insertion and ligation of the H_{N}/A DNA (SEQ ID NO:2) cleaved with PstI+XbaI. The final construct contains the LC-linker-BAM(1-22)-spacer-H_{N}/A ORF (SEQ ID NO:110) for transfer into expression vectors for expression to result in a fusion protein of the sequence illustrated in SEQ ID NO:111.

### Preparation of the LC/A-BAM(8-22)-H_{N}/A Fusion

[0686] In order to create the LC-linker-BAM(8-22)-spacer-H_{N}/A construct, the pCR 4 vector encoding the linker-BAM(8-22)-spacer insert is cleaved with BamHI+SalI restriction enzymes. This cleaved vector then serves as the recipient vector for insertion and ligation of the LC/A DNA (SEQ ID NO:1) cleaved with BamHI+SalI. The resulting plasmid DNA is then cleaved with PstI+XbaI restriction enzymes and serves as the recipient vector for the insertion and ligation of the H_{N}/A DNA (SEQ ID NO:2) cleaved with PstI+XbaI. The final construct contains the LC-linker-BAM(8-22)-spacer-H_{N}/A ORF for transfer into expression vectors for expression to result in a fusion protein of the sequence illustrated in SEQ ID NO:113.

### Preparation of Linker-Spacer-BAM8-22 Insert

[0687] The LC-H_{N} linker can be designed from first principle, using the existing sequence information for the linker as the template. For example, the serotype A linker (in this case defined as the inter-domain polypeptide region that exists between the cysteines of the disulphide bridge between LC and H_{N}) is 23 amino acids long and has the sequence VRGIITSKTKSLDKGYNKALNDL. Within this sequence, it is understood that proteolytic activation in nature leads to an H_{N} domain that has an N-terminus of the sequence ALNDL. This sequence information is freely available from available database sources such as GenBank (accession number P10845) or Swissprot (accession locus BXA1_CLOBO). Into this linker an enterokinase site is incorporated; and using one of a variety of reverse translation software tools (for example EditSeq best E. coli reverse translation (DNASTAR Inc.), or Backtranslation tool v2.0 (Entelechon)), the DNA sequence encoding the linker-ligand-spacer region is determined. Restriction sites are then incorporated into the DNA sequence and can be arranged as BamHI-SalI-linker-protease site-PstI-XbaI-spacer-SpeI-BAMS-22-stop codon-HindIII. It is important to ensure the correct reading frame is maintained for the spacer, BAM and restriction sequences and that the XbaI sequence is not preceded by the bases, TC, which would result on DAM methylation. The DNA sequence is screened for restriction sequence incorporation, and any additional sequences are removed manually from the remaining sequence ensuring common E. coli codon usage is maintained. E. coli codon usage is assessed by reference to software programs such as Graphical Codon Usage Analyser (Geneart), and the % GC content and codon usage ratio assessed by reference to published codon usage tables (for example, GenBank Release 143, 13 Sep. 2004). This optimised DNA sequence is then commercially synthesized (for example by Entelechon, Geneart or Sigma-Genosys) and is provided in the pCR 4 vector.

### Preparation of the LC/A-HN/A-BAM(8-22) Fusion

[0688] In order to create the LC/A-H_{N}/A-BAM(8-22) construct, the pCR 4 vector encoding the linker-spacer-BAM(1-22) insert is cleaved with BamHI+SalI restriction enzymes. This cleaved vector then serves as the recipient vector for insertion and ligation of the LC/A DNA (SEQ ID NO:1) cleaved with BamHI+SalI. The resulting plasmid DNA is then cleaved with PstI+XbaI restriction enzymes and serves as the recipient vector for the insertion and ligation of the H_{N}/A DNA (SEQ ID NO:2) cleaved with PstI+XbaI. The final construct contains the LC/A-linker-protease site-H_{N}/A-spacer-SpeI-BAM8-22 ORF for transfer into expression vectors for expression to result in a fusion protein of the sequence illustrated in SEQ ID NO:112.

### Purification Method for BAM Fusion Proteins

[0689] The fusion proteins were purified as described in Example 40.

### Example 45

### Construction of CHO-K1 OPRM1 Binding Assay and NCI-H69 SNAP-25 Cleavage Assay

[0690] A radioligand binding assay for measurement of the binding affinity (pK_{I}) of a range of reference ligands and fusions to human μ-opioid (OP₃) receptors in CHO cells stably transfected with the human μ-opioid receptors (CHO-MOR cells) was used. The assay involves the specific labeling of μ-opioid receptors (MOR) expressed in CHO cells with the MOR selective agonist radioligand [³H]-DAMGO. Increasing amounts of unlabelled competing ligand (Syntaxin ligands or reference compounds) are incubated with a fixed amount of radioligand and cell membranes. Upon completion of the assay, reaction mixtures are filtered through glass fibre paper where radioactivity associated with MOR receptors becomes trapped. The radioactivity of each filter is quantified and this relates to the ability of the competing ligand to bind to the MOR receptor in place of the radioligand. Ligands better able to bind to the MOR receptor will appear to ‘displace’ the radiolabel at lower concentrations.

### Cell Culture

[0691] CHO-MOR cells (CHO-K1 cells with stable expression of the μ (OP₃) Perkin Elmer ES-542-C) were cultured according to the supplier's recommendations. Cells were grown in Hams F12 containing 10% FBS and 400 μg/ml G418 at 37° C. in an atmosphere of 95% O₂/5% CO₂. Cells were passaged when cells had reached 80% confluency, typically every 3-4 days.

[0692] Cells were grown in eight T175 flasks to approximately 80% confluence, the culture medium was removed and the cells washed twice with 10-20 ml PBS. Cells were removed from the flask by addition of 5 ml of PBS based enzyme free dissociation buffer, and incubated at 37° C. for 10 min followed by gentle tapping of the flasks to dislodged cells. Ten ml of culture media was added to the flasks and the cells were transferred to a 50 ml Falcon tube. Flasks were washed with a further 20 ml culture media which was then added to the cell suspension. Cells were centrifuged (1300×g, 3 min), the supernatant removed, and the cell pellet resuspended in culture media by trituration. A cell sample was removed and the viable cell number calculated using a Nucleocounter (ChemoMetec). The volume of media was adjusted to give a final concentration of 5×10⁶ cells/ml. One ml aliquots of the resultant cell suspension were transferred to 1.5 ml microfuge tubes and centrifuged (100×g, 5 min), the supernatant was removed and the cell pellets frozen and stored at −80° C.

### Membrane Preparation

[0693] On the day of the assay, the required number of cell pellets was removed from −80° C. and 1 ml ice cold membrane preparation buffer (50 mM Tris pH 7.4 at 4° C.) was added to each pellet. Individual cell pellets were dislodged by vortexing, collected into a 40 ml centrifuge tube and the total volumes adjusted to 10 ml. Cells were homogenised (1×1 s) using an Ultra Turrax® T25-digital homogeniser (IKA-WERKE), at the highest setting (25,000 min⁻¹). Membranes were diluted to the required cell concentrations in Assay Buffer (50 mM Tris pH 6.96 at 21° C.) by counting the total cells in a Nucleocounter® and make to 300,000 cells/ml.

### Competition Binding Assay

[0694] In order to determine the binding profile of a number of μ-opioid receptor ligands or fusions, competition binding assays were performed in which a fixed concentration of [³H]-DAMGO was competed with increasing concentrations of the μ-opioid receptor ligands or fusion protein. CHO-MOR cell membranes (equivalent to 30,000 cells per well) were incubated with a fixed concentration of [³H]-DAMGO (1 nM) and increasing concentrations of competing ligand or fusion (0.01 nM to 1 μM), in Assay Buffer (50 mM Tris pH 6.96 at 21° C.). To define the non-specific and total binding, each reaction was performed in the presence or absence of CTOP (1 μM). Reactions were performed, in triplicate, in deep-well ‘LoBind Protein’ 96-well plates (200 μl final volume) and initiated by addition of cell membranes. Assay plates were mixed, covered with a plate sealer and incubated for 1 hr at room temperature. Reactions were terminated by rapid filtration through Whatman GF/B filters using a Brandel cell harvester, filters were washed (3×3 ml) with ice-cold wash buffer (50 mM Tris-HCl, pH 7.4 at 4° C.) and transferred to scintillation vials. Scintillation fluid was added to each vial and after 3 hours bound radioactivity was quantified in a Tri-Carb 2900TR liquid scintillation analyser by counting each vial for 3 min.

### NCI-H69 SNAP-25 Cleavage Assay

[0695] SNARE cleavage by betaendorphin fusions was demonstrated by developing a NCI-H69 SNAP-25 cleavage assay. This assay used the human small cell lung carcinoma cell line NCI-H69.

[0696] H69 cells were plated into poly-D-Lysine coated 96 well plates at 4×10⁵ cells/ml. The plates were left for 24-48 hours prior to treatment. H69 feeding Medium consisted of RPMI-1640 containing 10% FBS, 4.5 g/l Glucose, 1.5 g/l Sodium bicarbonate, 1 mM Sodium Pyruvate, 10 mM HEPES, 2 mM Glutamine. 50 ml of cell media was filtered sterilised into a sterile 50 ml centrifuge tube using a syringe and 0.2 μm filter to be used to create two separate dilutions series for each TSI, with starting points at half log intervals (starting at 1 μM and 300 nM). The two resulting series were then combined into one dose curve. Each concentration was plated in triplicate across the plate with a dose curve running down the plate. By removing 125 μl media from the cell plate to be treated and adding 125 μl of each TSI solution to the well. Then the plate was placed in an incubator at 37° C., 5% CO₂ for 24 hours. After 24 hours, test materials/feeding medium was removed from the plate by inverting over a waste receptacle and the remaining media from each well was removed using a fine-tipped pastette. Next, the cells were lysed using Lysis buffer (25% 4× NuPAGE® LDS sample buffer, 10% 1M DTT, 65% dH₂O); 100 μl lysis buffer was added to each well, and the plate left at room temperature for 5 minutes. Then the lysate was transferred from each well into a 1.5 ml microcentrifuge tube using a Gilson P200 pipette and placed in a heat block pre-warmed to 90° C. for 10 minutes. SNAP-25 cleavage was then determined by Western blotting with a SNAP-25 antibody. 15 μl of lysed samples and 3 μl Invitrogen Magic Marker XP (LC5602) and 3 μl Invitrogen See Blue Plus 2 pre-stained standard (LC5925) was loaded onto Invitrogen 12% bis-tris 1 mm, 15 well gels that were immersed in Invitrogen NuPAGE® MOPS SDS Running Buffer. The gel was then run at 200 V until the Lysozyme 14 kDa marker is just above the gel base (approximately 70 minutes). Transferred proteins from the gel to a nitrocellulose membrane on an iBlot® dry blotting system from Invitrogen (IB1001UK), on program 2 (23 volts) for 6 minutes, according to the manufacturers instructions. On completion of the iBlot® program, the membrane was removed from the transfer stack and placed in a small tray containing blocking buffer (5 g Marvel® milk powder per 100 ml PBS/Tween 0.1%). The membrane was then incubated with blocking buffer solution at room temperature, on a rocker, for 60 minutes. After blocking, the primary antibody solution was added to the blocking buffer and membrane; 10μ Anti-SNAP-25 (Sigma S-9684) added per 10 ml blocking buffer (1:1000 dilution). Sigma's anti-SNAP-25 is reactive toward the whole SNAP-25 protein so it therefore recognizes the intact and cleaved SNAP-25. Membranes were incubated with primary antibody at room temperature, on a rocker, for 60 minutes. Then the membranes were washed by performing 3 rinses with PBS/Tween 0.1% and further blocking buffer added before incubating the membranes at room temperature, on a rocker, for 10 minutes. After incubation in blocking buffer the secondary antibody was added to the membrane; 20 μl of Anti-Rabbit-HRP conjugate (Sigma A-6154) was added per 40 ml blocking buffer (1:2000 dilution). The membrane was incubated with secondary antibody at room temperature, on a rocker, for 60 minutes before being washed three times with PBS/Tween (0.1%). Again, further blocking buffer was added to the membrane and the membrane incubated at room temperature, on a rocker, for 30 minutes before being washed 3 times with PBS/Tween (0.1%). Finally, detection of bound antibody solution done using Pierce West-Dura® supersignal (34075) detection reagents. The detection reagents were mixed (Luminol/Enhancer Solution, Stable Peroxide Buffer) at a 1:1 ratio (a total volume of 2 ml per mini membrane) and applied to the membrane, ensuring that the membrane is completely flat and the reagents cover it completely. The membrane was incubated for 5 minutes at room temperature before Chemiluminescent detection was performed on the GeneGnome HR Syngene system from Synoptics. The exposure was set to 5 minutes and Gene tools software from Syngene was used to calculate the relative amounts of cleaved and uncleaved SNAP-25 within each lane.

### Example 46

### Construction of CHO-K1 BDKRB₁ and CHO-K1 BDKRB₂ Receptor Activation Assay

### CHO-K1 BDKB₂ Receptor Activation Assay

[0697] A receptor activation assay was developed for which stably transfected CHO-K1 cells with the B₂ receptor were used in a calcium fluorimetry assay measuring intracellular calcium levels. The assay allowed the measurement of the potency (pEC₅₀) and intrinsic efficacy (Eₘₐₓ) of the bradykinin ligand and fusions. The assay involves indirect measurement of B₂-receptor activation by measuring changes in intracellular calcium levels using a Flexstation3® and calcium-sensitive dye.

### Culture of CHO-K1 B2 Cells

[0698] CHO-K1 cells with stable expression of the B₂ receptor (CHO-K1-B₂-R; ES-090-C) were purchased from Perkin Elmer. Cells were cultured in Ham's F12 containing 2 mM glutamine, 10% FBS and 400 μg/ml G418 at 37° C. in a humidified environment containing 5% CO₂. Cells were passaged every 3 to 5 days when cells were approximately 80% confluent. The media was removed and the cells washed twice with PBS. Cells were harvested using a PBS-based non-enzymatic cell dissociation buffer at 37° C. for 2-3 minutes, pelleted by centrifugation, resuspended in culture media and seeded into fresh T175 flasks.

### Seeding of CHO-K1 B2 Cells

[0699] Cells were harvested using a PBS-based non-enzymatic cell dissociation buffer at 37° C. for 2-3 minutes. Cells were collected by centrifugation, resuspended in culture media and the cell concentration determined using a Nucleocounter (ChemoMetec). Cells were diluted in culture media to the required concentration of 2×10⁵ cells/ml and seeded into 96-well plates at a volume of 100 μl per well. Cells were incubated at 37° C. in 5% CO₂ overnight.

### Estimation of Potency and Intrinsic Activity of Bradykinin and BK Fusions

[0700] The following day after seeding, culture media was removed from the cells and replaced with 100 μl per well of assay buffer (HBSS with 1.26 mM CaCl₂, 0.49 mM MgCl₂, 0.4 mM MgSO₄ and 20 mM HEPES at pH 7.4) containing 5 mM Probenecid (Probenecid final concentration of 2.5 mM) and FLIPR calcium 4 loading dye (100 μl). Cells were incubated at 37° C. in 5% CO₂ for 60 min after which increasing concentrations of bradykinin (50 μl) or fusion protein were added to the cells in triplicate by the Flexstation3®. The change in fluorescent emission at 525 nm following excitation at 485 nm was determined over a 70 s time period using the FlexStation3®.

### CHO-K1 BDKB₁ Receptor Activation Assay

[0701] An assay was also developed to allow the measurement of potency (pEC₅₀) and efficacy (Eₘₐₓ) of bradykinin ligands at the human bradykinin B₁ receptor stably expressed in CHO-K1 cells. This assay was similar to the B₂ receptor activation assay as it measured the changes in intracellular calcium levels using a calcium fluorimetry assay. CHO-K1 cells with stable expression of the B₁ receptor were purchased from Perkin Elmer (ES-091-C).

### Culture of CHO-K1 B1 Cells

[0702] CHO-K1 cells with stable expression of the human B1 receptor (CHO-K1-B1 cells) were cultured in culture media (Ham's F12 containing 2 mM glutamine, 10% FBS and 400 μg.ml-1 G418) at 37° C. in a humidified environment containing 5% CO₂. Cells were passaged every 3 to 5 days when cells were approximately 80% confluent. The media was removed and the cells washed twice with PBS. Cells were harvested using a PBS-based non-enzymatic cell dissociation buffer at 37° C. for 2-3 min, pelleted by centrifugation (1,500 rpm; 3 min), re-suspended in culture media and seeded into fresh T500 flasks. Cells were pelleted by centrifugation at 1,300 rpm for 3 min in a Hereaus megafuge 1.0. Then the cell pellet was resuspended in Bambanker freezing medium to achieve a concentration of 3×10⁶ cells/ml and aliquoted into 1.8 ml Nunc cryovials. The cryovials were transferred to a cryo vial rack and stored at −80° C. overnight before transferring the vials to the short-term liquid nitrogen store.

### Seeding of CHO-K1 B1 Cells

[0703] The day before the assay, cell vials were removed from the liquid nitrogen store and thawed quickly by placing vials in a 37° C. water bath. Cells were then pelleted by centrifuging at 1,300 rpm for 3 min in a Hereaus megafuge 1.0. The cell pellet was re-suspend in 2 ml media/vial and the number of viable cells in the suspension counted using the Nucleocounter. Added media to the cell suspension to achieve a cell concentration of 1×10⁶ cells/ml. Then the cells were plated in a Corning black walled, clear-bottom, half-area plate at a density of 20,000 viable cells/well; using a Rainin E8-300 multi-channel pipette added 30 μl media to each well followed by 20 μl/well of the 1×10⁶ cells/ml cell suspension. Maintained the plates overnight at 37° C. in a humidified environment containing 5% CO₂.

Estimation of Potency and Intrinsic Activity of des-Arg Bradykinin and BK Fusions

[0704] Next day the plates were incubated (37° C. in a humidified environment containing 5% CO₂) in HBSS modified assay buffer (with 1.26 mM CaCl₂, 0.49 mM MgCl₂, 0.4 mM MgSO₄ and 20 mM HEPES at pH 7.4) containing x 0.5 Ca²⁺-dye, Probenecid (2.5 mM). After 1 hour, increasing concentrations of des-Arg⁹-BK and fusion proteins were added to the cells in triplicate rows by the FlexStation3® (height 70 μl; speed 16 μl/s; 37° C.). The fluorescence emitted at 525 nm was measured over a 60 s time period and expressed as percent increase in baseline RFU.

### Example 47

### Construction and Activation of Bradykinin Fusion Proteins

[0705] Following the methods used in Examples 1 and 2, the LC/A (SEQ ID NO:1) and H_{N}/A (SEQ ID NO:2) are created and inserted into the A serotype bradykinin linker arranged as BamHI-SalI-linker-protease site-PstI-XbaI-spacer-SpeI-bradykinin-stop codon-HindIII. The final construct contains the LC/A-linker-protease site-HN/A-spacer-SpeI-Bradykinin ORF (SEQ ID NO:119) for expression as a protein of the sequence illustrated in SEQ ID NO:120.

[0706] Alternatively, the bradykinin (SEQ ID NO:117) in the bradykinin linker was replaced by des Arg⁹-bradykinin (SEQ ID NO:118) so that the final construct contains the LC/A-linker-protease site-HN/A-spacer-SpeI-des Arg⁹-Bradykinin ORF for expression as a protein of the sequence illustrated in SEQ ID NO:121.

### Purification Method for Bradykinin Fusion Proteins

[0707] The fusion proteins were purified as described in Example 40.

### Example 48

### Construction and Activation of Substance P Fusion Proteins

[0708] Following the methods used in Examples 1 and 2, the LC/A (SEQ ID NO:1) and H_{N}/A (SEQ ID NO:2) are created and inserted into the A serotype substance P analogue (S6) linker arranged as BamHI-SalI-linker-protease site-PstI-XbaI-spacer-SpeI-substance P(S6)-stop codon-HindIII. The final construct contains the LC/A-linker-protease site-HN/A-spacer-SpeI-substance P(S6) ORF for expression as a protein of the sequence illustrated in SEQ ID NO:124.

### Purification Method for Substance P Fusion Proteins

[0709] The fusion proteins were purified as described in Example 40.

### Example 49

[0710] A method of treating, preventing or ameliorating pain in a subject, comprising administration to said patient a therapeutic effective amount of fusion protein, wherein said pain is selected from the group consisting of: chronic pain arising from malignant disease, chronic pain not caused by malignant disease (peripheral neuropathies).

[0711] Patient A

[0712] A 73 year old woman suffering from severe pain caused by posthepatic neuralgia is treated by a peripheral injection with fusion protein to reduce neurotransmitter release at the synapse of nerve terminals to reduce the pain. The patient experiences good analgesic effect within 2 hours of said injection.

[0713] Patient B

[0714] A 32 year old male suffering from phantom limb pain after having his left arm amputated following a car accident is treated by peripheral injection with fusion protein to reduce the pain. The patient experiences good analgesic effect within 1 hour of said injection.

[0715] Patient C

[0716] A 55 year male suffering from diabetic neuropathy is treated by a peripheral injection with fusion protein to reduce neurotransmitter release at the synapse of nerve terminals to reduce the pain. The patient experiences good analgesic effect within 4 hours of said injection.

[0717] Patient D

[0718] A 63 year old woman suffering from cancer pain is treated by a peripheral injection with fusion protein to reduce neurotransmitter release at the synapse of nerve terminals to reduce the pain. The patient experiences good analgesic effect within 4 hours of said injection.

[0719] All documents, books, manuals, papers, patents, published patent applications, guides, abstracts and other reference materials cited herein are incorporated by reference in their entirety. While the foregoing specification teaches the principles of the present invention, with examples provided for the purpose of illustration, it will be appreciated by one skilled in the art from reading this disclosure that various changes in form and detail can be made without departing from the true scope of the invention.

[0720] While illustrative embodiments have been illustrated and described, it will be appreciated that various changes can be made therein without departing from the spirit and scope of the invention.

The embodiments of the invention in which an exclusive property or privilege is claimed are defined as follows:

1. A single chain, polypeptide fusion protein, comprising:
a. a non-cytotoxic protease, or a fragment thereof, which protease or protease fragment cleaves a protein of the exocytic fusion apparatus of a nociceptive sensory afferent;
b. a Targeting Moiety that binds to a Binding Site on the nociceptive sensory afferent, which Binding Site endocytoses to be incorporated into an endosome within the nociceptive sensory afferent;
c. a protease cleavage site at which site the fusion protein is cleavable by a protease, wherein the protease cleavage site is located between the non-cytotoxic protease or fragment thereof and the Targeting Moiety;
d. a translocation domain that translocates the protease or protease fragment from within an endosome, across the endosomal membrane and into the cytosol of the nociceptive sensory afferent.
wherein the Targeting Moiety is selected from the group consisting of BAM, β-endorphin, bradykinin, substance P, dynorphin and/or nociceptin.

2. The fusion protein according to claim 1, wherein the non-cytotoxic protease is a clostridial neurotoxin L-chain or an IgA protease.

3. The fusion protein according to claim 1, wherein the translocation domain is the H_{N} domain of a clostridial neurotoxin.

4. The fusion protein according to claim 1, wherein the Targeting Moiety binds specifically to a receptor selected from the group consisting of: Mrg receptors such as MrgX1, opioid receptors such as OPRD1 and/or OPRM1, BDKRB1 and/or BDKRB2, Tachykinin receptors such as TACR1, TACR2 and/or TACR3, Kappa receptor (OPRK1) and/or ORL₁ receptor.

5. The fusion protein according to claim 1, wherein the Targeting Moiety comprises an amino acid sequence having at least 70% sequence identity to the amino acid sequence selected from the group consisting of SEQ ID NOs: 38, 40, 42, 44, 46, 48, 50, 89, 108, 109, 114, 117, 118, 122 and/or 123.

6. The fusion protein according to claim 1, wherein said fusion protein comprises an amino acid sequence having at least 90% sequence identity to the amino acid sequence selected from the group consisting of SEQ ID NOs: 24, 98, 99, 100, 101, 102, 103, 104, 105, 106, 107, 111, 112, 113, 115, 116, 120, 121, 124, 125 126, 129, 130, 131, 132, 133, 134, 135, 136, 137, 138, 139, 140, 141, 142, 143, 144, 145, 146, 147, 148, 149, 150, 151, 152, 153, 154, 155, 156, and/or 157.

7. A polynucleotide molecule encoding the polypeptide fusion protein according to claim 1.

8. An expression vector, which comprises a promoter, the polynucleotide molecule according to claim 7, wherein said polynucleotide molecule is located downstream of the promoter, and a terminator located downstream of the polynucleotide molecule.

9. A polynucleotide molecule comprising a nucleic acid sequence that is the complement of the nucleic acid sequence according to claim 7.

10. A method for preparing a single-chain polypeptide fusion protein, comprising:
a. transfecting a host cell with the expression vector of claim 8, and
b. culturing said host cell under conditions promoting expressing of the polypeptide fusion protein by the expression vector.

11. A method of preparing a non-cytotoxic agent, comprising:
a. contacting a single-chain polypeptide fusion protein according to claim 1 with a protease capable of cleaving the protease cleavage site;
b. cleaving the protease cleavage site; and thereby forming a di-chain fusion protein.

12. A non-cytotoxic polypeptide, obtained by the method of claim 11, wherein the polypeptide is a di-chain polypeptide, and wherein:
a. the first chain comprises the non-cytotoxic protease, or a fragment thereof, which protease or protease fragment is capable of cleaving a protein of the exocytic fusion apparatus of a nociceptive sensory afferent;
b. the second chain comprises the TM and the translocation domain that is capable of translocating the protease or protease fragment from within an endosome, across the endosomal membrane and into the cytosol of the nociceptive sensory afferent; and
the first and second chains are disulphide linked together.

13. A method of treating, preventing or ameliorating pain in a subject, comprising administering to said patient a therapeutically effective amount of the fusion protein according to claim 1.

14. A method according to claim 13, wherein the pain is chronic pain selected from neuropathic pain, inflammatory pain, headache pain, somatic pain, visceral pain, and referred pain.

15. A method of treating, preventing or ameliorating pain in a subject, comprising administering to said patient a therapeutically effective amount of a polypeptide according to claim 12.

16. A method according to claim 15, wherein the pain is chronic pain selected from neuropathic pain, inflammatory pain, headache pain, somatic pain, visceral pain, and referred pain.

The application's sequence listing, which the Patent Office published only in electronic form, follows.

SEQUENCE LISTING (157 sequences)

SEQ ID NO: 1 - DNA, 1302 bp, Artificial Sequence
  Synthetic
ggatccatggagttcgttaacaaacagttcaactataaagacccagttaacggtgttgacattgcttacatcaaaatcccgaacgctggccagatgcagccggtaaaggcattcaaaatccacaacaaaatctgggttatcccggaacgtgatacctttactaacccggaagaaggtgacctgaacccgccaccggaagcgaaacaggtgccggtatcttactatgactccacctacctgtctaccgataacgaaaaggacaactacctgaaaggtgttactaaactgttcgagcgtatttactccaccgacctgggccgtatgctgctgactagcatcgttcgcggtatcccgttctggggcggttctaccatcgataccgaactgaaagtaatcgacactaactgcatcaacgttattcagccggacggttcctatcgttccgaagaactgaacctggtgatcatcggcccgtctgctgatatcatccagttcgagtgtaagagctttggtcacgaagttctgaacctcacccgtaacggctacggttccactcagtacatccgtttctctccggacttcaccttcggttttgaagaatccctggaagtagacacgaacccactgctgggcgctggtaaattcgcaactgatcctgcggttaccctggctcacgaactgattcatgcaggccaccgcctgtacggtatcgccatcaatccgaaccgtgtcttcaaagttaacaccaacgcgtattacgagatgtccggtctggaagttagcttcgaagaactgcgtacttttggcggtcacgacgctaaattcatcgactctctgcaagaaaacgagttccgtctgtactactataacaagttcaaagatatcgcatccaccctgaacaaagcgaaatccatcgtgggtaccactgcttctctccagtacatgaagaacgtttttaaagaaaaatacctgctcagcgaagacacctccggcaaattctctgtagacaagttgaaattcgataaactttacaaaatgctgactgaaatttacaccgaagacaacttcgttaagttctttaaagttctgaaccgcaaaacctatctgaacttcgacaaggcagtattcaaaatcaacatcgtgccgaaagttaactacactatctacgatggtttcaacctgcgtaacaccaacctggctgctaattttaacggccagaacacggaaatcaacaacatgaacttcacaaaactgaaaaacttcactggtctgttcgagttttacaagctgctgtgcgtcgac

SEQ ID NO: 2 - DNA, 1257 bp, Artificial Sequence
  Synthetic
ctgcagtgtatcaaggttaacaactgggatttattcttcagcccgagtgaagacaacttcaccaacgacctgaacaaaggtgaagaaatcacctcagatactaacatcgaagcagccgaagaaaacatctcgctggacctgatccagcagtactacctgacctttaatttcgacaacgagccggaaaacatttctatcgaaaacctgagctctgatatcatcggccagctggaactgatgccgaacatcgaacgtttcccaaacggtaaaaagtacgagctggacaaatataccatgttccactacctgcgcgcgcaggaatttgaacacggcaaatcccgtatcgcactgactaactccgttaacgaagctctgctcaacccgtcccgtgtatacaccttcttctctagcgactacgtgaaaaaggtcaacaaagcgactgaagctgcaatgttcttgggttgggttgaacagcttgtttatgattttaccgacgagacgtccgaagtatctactaccgacaaaattgcggatatcactatcatcatcccgtacatcggtccggctctgaacattggcaacatgctgtacaaagacgacttcgttggcgcactgatcttctccggtgcggtgatcctgctggagttcatcccggaaatcgccatcccggtactgggcacctttgctctggtttcttacattgcaaacaaggttctgactgtacaaaccatcgacaacgcgctgagcaaacgtaacgaaaaatgggatgaagtttacaaatatatcgtgaccaactggctggctaaggttaatactcagatcgacctcatccgcaaaaaaatgaaagaagcactggaaaaccaggcggaagctaccaaggcaatcattaactaccagtacaaccagtacaccgaggaagaaaaaaacaacatcaacttcaacatcgacgatctgtcctctaaactgaacgaatccatcaacaaagctatgatcaacatcaacaagttcctgaaccagtgctctgtaagctatctgatgaactccatgatcccgtacggtgttaaacgtctggaggacttcgatgcgtctctgaaagacgccctgctgaaatacatttacgacaaccgtggcactctgatcggtcaggttgatcgtctgaaggacaaagtgaacaataccttatcgaccgacatcccttttcagctcagtaaatatgtcgataaccaacgccttttgtccactctagactagaagctt

SEQ ID NO: 3 - DNA, 1323 bp, Artificial Sequence
  Synthetic
ggatccatgccggttaccatcaacaacttcaactacaacgacccgatcgacaacaacaacatcattatgatggaaccgccgttcgcacgtggtaccggacgttactacaaggcttttaagatcaccgaccgtatctggatcatcccggaacgttacaccttcggttacaaacctgaggacttcaacaagagtagcgggattttcaatcgtgacgtctgcgagtactatgatccagattatctgaataccaacgataagaagaacatattccttcagactatgattaaactcttcaaccgtatcaaaagcaaaccgctcggtgaaaaactcctcgaaatgattatcaacggtatcccgtacctcggtgaccgtcgtgtcccgcttgaagagttcaacaccaacatcgcaagcgtcaccgtcaacaaactcatcagcaacccaggtgaagtcgaacgtaaaaaaggtatcttcgcaaacctcatcatcttcggtccgggtccggtcctcaacgaaaacgaaaccatcgacatcggtatccagaaccacttcgcaagccgtgaaggtttcggtggtatcatgcagatgaaattctgcccggaatacgtcagtgtcttcaacaacgtccaggaaaacaaaggtgcaagcatcttcaaccgtcgtggttacttcagcgacccggcactcatcctcatgcatgaactcatccacgtcctccacggtctctacggtatcaaagttgacgacctcccgatcgtcccgaacgagaagaaattcttcatgcagagcaccgacgcaatccaggctgaggaactctacaccttcggtggccaagacccaagtatcataaccccgtccaccgacaaaagcatctacgacaaagtcctccagaacttcaggggtatcgtggacagactcaacaaagtcctcgtctgcatcagcgacccgaacatcaatatcaacatatacaagaacaagttcaaagacaagtacaaattcgtcgaggacagcgaaggcaaatacagcatcgacgtagaaagtttcgacaagctctacaaaagcctcatgttcggtttcaccgaaaccaacatcgccgagaactacaagatcaagacaagggcaagttacttcagcgacagcctcccgcctgtcaaaatcaagaacctcttagacaacgagatttacacaattgaagagggcttcaacatcagtgacaaagacatggagaaggaatacagaggtcagaacaaggctatcaacaaacaggcatacgaggagatcagcaaagaacacctcgcagtctacaagatccagatgtgcgtcgac

SEQ ID NO: 4 - DNA, 1260 bp, Artificial Sequence
  Synthetic
ctgcagtgcatcgacgttgacaacgaagacctgttcttcatcgctgacaaaaacagcttcagtgacgacctgagcaaaaacgaacgtatcgaatacaacacccagagcaactacatcgaaaacgacttcccgatcaacgaactgatcctggacaccgacctgataagtaaaatcgaactgccgagcgaaaacaccgaaagtctgaccgacttcaacgttgacgttccggtttacgaaaaacagccggctatcaagaaaatcttcaccgacgaaaacaccatcttccagtacctgtacagccagaccttcccgctggacatccgtgacatcagtctgaccagcagtttcgacgacgctctgctgttcagcaacaaagtttacagtttcttcagcatggactacatcaaaaccgctaacaaagttgttgaagcagggctgttcgctggttgggttaaacagatcgttaacgacttcgttatcgaagctaacaaaagcaacactatggacaaaatcgctgacatcagtctgatcgttccgtacatcggtctggctctgaacgttggtaacgaaaccgctaaaggtaactttgaaaacgctttcgagatcgctggtgcaagcatcctgctggagttcatcccggaactgctgatcccggttgttggtgctttcctgctggaaagttacatcgacaacaaaaacaagatcatcaaaaccatcgacaacgctctgaccaaacgtaacgaaaaatggagtgatatgtacggtctgatcgttgctcagtggctgagcaccgtcaacacccagttctacaccatcaaagaaggtatgtacaaagctctgaactaccaggctcaggctctggaagagatcatcaaataccgttacaacatctacagtgagaaggaaaagagtaacatcaacatcgacttcaacgacatcaacagcaaactgaacgaaggtatcaaccaggctatcgacaacatcaacaacttcatcaacggttgcagtgttagctacctgatgaagaagatgatcccgctggctgttgaaaaactgctggacttcgacaacaccctgaaaaagaacctgctgaactacatcgacgaaaacaagctgtacctgatcggtagtgctgaatacgaaaaaagtaaagtgaacaaatacctgaagaccatcatgccgttcgacctgagtatctacaccaacgacaccatcctgatcgaaatgttcaacaaatacaactctctagactagaagctt

SEQ ID NO: 5 - DNA, 1329 bp, Artificial Sequence
  Synthetic
ggatccgaattcatgccgatcaccatcaacaacttcaactacagcgatccggtggataacaaaaacatcctgtacctggatacccatctgaataccctggcgaacgaaccggaaaaagcgtttcgtatcaccggcaacatttgggttattccggatcgttttagccgtaacagcaacccgaatctgaataaaccgccgcgtgttaccagcccgaaaagcggttattacgatccgaactatctgagcaccgatagcgataaagataccttcctgaaagaaatcatcaaactgttcaaacgcatcaacagccgtgaaattggcgaagaactgatctatcgcctgagcaccgatattccgtttccgggcaacaacaacaccccgatcaacacctttgatttcgatgtggatttcaacagcgttgatgttaaaacccgccagggtaacaattgggtgaaaaccggcagcattaacccgagcgtgattattaccggtccgcgcgaaaacattattgatccggaaaccagcacctttaaactgaccaacaacacctttgcggcgcaggaaggttttggcgcgctgagcattattagcattagcccgcgctttatgctgacctatagcaacgcgaccaacgatgttggtgaaggccgtttcagcaaaagcgaattttgcatggacccgatcctgatcctgatgcatgaactgaaccatgcgatgcataacctgtatggcatcgcgattccgaacgatcagaccattagcagcgtgaccagcaacatcttttacagccagtacaacgtgaaactggaatatgcggaaatctatgcgtttggcggtccgaccattgatctgattccgaaaagcgcgcgcaaatacttcgaagaaaaagcgctggattactatcgcagcattgcgaaacgtctgaacagcattaccaccgcgaatccgagcagcttcaacaaatatatcggcgaatataaacagaaactgatccgcaaatatcgctttgtggtggaaagcagcggcgaagttaccgttaaccgcaataaattcgtggaactgtacaacgaactgacccagatcttcaccgaatttaactatgcgaaaatctataacgtgcagaaccgtaaaatctacctgagcaacgtgtataccccggtgaccgcgaatattctggatgataacgtgtacgatatccagaacggctttaacatcccgaaaagcaacctgaacgttctgtttatgggccagaacctgagccgtaatccggcgctgcgtaaagtgaacccggaaaacatgctgtacctgttcaccaaattttgcgtcgac

SEQ ID NO: 6 - DNA, 1263 bp, Artificial Sequence
  Synthetic
ctgcagtgtcgtgaactgctggtgaaaaacaccgatctgccgtttattggcgatatcagcgatgtgaaaaccgatatcttcctgcgcaaagatatcaacgaagaaaccgaagtgatctactacccggataacgtgagcgttgatcaggtgatcctgagcaaaaacaccagcgaacatggtcagctggatctgctgtatccgagcattgatagcgaaagcgaaattctgccgggcgaaaaccaggtgttttacgataaccgtacccagaacgtggattacctgaacagctattactacctggaaagccagaaactgagcgataacgtggaagattttacctttacccgcagcattgaagaagcgctggataacagcgcgaaagtttacacctattttccgaccctggcgaacaaagttaatgcgggtgttcagggcggtctgtttctgatgtgggcgaacgatgtggtggaagatttcaccaccaacatcctgcgtaaagataccctggataaaatcagcgatgttagcgcgattattccgtatattggtccggcgctgaacattagcaatagcgtgcgtcgtggcaattttaccgaagcgtttgcggttaccggtgtgaccattctgctggaagcgtttccggaatttaccattccggcgctgggtgcgtttgtgatctatagcaaagtgcaggaacgcaacgaaatcatcaaaaccatcgataactgcctggaacagcgtattaaacgctggaaagatagctatgaatggatgatgggcacctggctgagccgtattatcacccagttcaacaacatcagctaccagatgtacgatagcctgaactatcaggcgggtgcgattaaagcgaaaatcgatctggaatacaaaaaatacagcggcagcgataaagaaaacatcaaaagccaggttgaaaacctgaaaaacagcctggatgtgaaaattagcgaagcgatgaataacatcaacaaattcatccgcgaatgcagcgtgacctacctgttcaaaaacatgctgccgaaagtgatcgatgaactgaacgaatttgatcgcaacaccaaagcgaaactgatcaacctgatcgatagccacaacattattctggtgggcgaagtggataaactgaaagcgaaagttaacaacagcttccagaacaccatcccgtttaacatcttcagctataccaacaacagcctgctgaaagatatcatcaacgaatacttcaatctagactagaagctt

SEQ ID NO: 7 - DNA, 207 bp, Artificial Sequence
  Synthetic
ggatccacgcacgtcgacggcatcattacctccaaaactaaatctctgatcgaaggtcgttttggcggtttcacgggcgcacgcaaatcagcgcgtaaattagctaaccaggcgctagcgggcggtggcggtagcggcggtggcggtagcggcggtggcggtagcgcactagtgctgcagacgcacggtctagaatgataaaagctt

SEQ ID NO: 8 - DNA, 108 bp, Artificial Sequence
  Synthetic
ggatccacgcacgtcgacggcatcattacctccaaaactaaatctctgatagaaggtagaaacaaagcgctgaacctgcagacgcacggtctagaatgataaaagctt

SEQ ID NO: 9 - DNA, 186 bp, Artificial Sequence
  Synthetic
catatgaataacctcgggattgagggtcgttttggcggtttcacgggcgcacgcaaatcagcgcgtaaattagctaaccagactagtggcggtgggggtagtggcggtggcggttcgggcgggggtgggagccctaggggatccgtcgacctgcagggtctagaagcgctagcgtgataaaagctt

SEQ ID NO: 10 - DNA, 180 bp, Artificial Sequence
  Synthetic
ggatccacgcacgtcgacgcgattgatggtcgttttggcggtttcacgggcgcacgcaaatcagcgcgtaaattagctaaccaggcgctagcgggcggtggcggtagcggcggtggcggtagcggcggtggcggtagcgcactagtgctgcagacgcacggtctagaatgataaaagctt

SEQ ID NO: 11 - DNA, 249 bp, Artificial Sequence
  Synthetic
ggatccacgcacgtcgacggcatcattacctccaaaactaaatctctgatcgaaggtcgttacggtggtttcatgacctctgaaaaatctcagaccccgctggttaccctgttcaaaaacgctatcatcaaaaacgcttacaaaaaaggtgaagcgctagcgggtggtggtggttctggtggtggtggttctggtggtggtggttctgcactagtgctgcagacgcacggtctagaatgataaaagctt

SEQ ID NO: 12 - DNA, 207 bp, Artificial Sequence
  Synthetic
ggatccacgcacgtcgacggcatcattacctccaaaactaaatctctgatcgaaggtcgttttggcggtttcacgggcgcacgcaaatcagcgcgtaaacgtaagaaccaggcgctagcgggcggtggcggtagcggcggtggcggtagcggcggtggcggtagcgcactagtgctgcagacgcacggtctagaatgataaaagctt

SEQ ID NO: 13 - DNA, 2709 bp, Artificial Sequence
  Synthetic
ggatccatggagttcgttaacaaacagttcaactataaagacccagttaacggtgttgacattgcttacatcaaaatcccgaacgctggccagatgcagccggtaaaggcattcaaaatccacaacaaaatctgggttatcccggaacgtgatacctttactaacccggaagaaggtgacctgaacccgccaccggaagcgaaacaggtgccggtatcttactatgactccacctacctgtctaccgataacgaaaaggacaactacctgaaaggtgttactaaactgttcgagcgtatttactccaccgacctgggccgtatgctgctgactagcatcgttcgcggtatcccgttctggggcggttctaccatcgataccgaactgaaagtaatcgacactaactgcatcaacgttattcagccggacggttcctatcgttccgaagaactgaacctggtgatcatcggcccgtctgctgatatcatccagttcgagtgtaagagctttggtcacgaagttctgaacctcacccgtaacggctacggttccactcagtacatccgtttctctccggacttcaccttcggttttgaagaatccctggaagtagacacgaacccactgctgggcgctggtaaattcgcaactgatcctgcggttaccctggctcacgaactgattcatgcaggccaccgcctgtacggtatcgccatcaatccgaaccgtgtcttcaaagttaacaccaacgcgtattacgagatgtccggtctggaagttagcttcgaagaactgcgtacttttggcggtcacgacgctaaattcatcgactctctgcaagaaaacgagttccgtctgtactactataacaagttcaaagatatcgcatccaccctgaacaaagcgaaatccatcgtgggtaccactgcttctctccagtacatgaagaacgtttttaaagaaaaatacctgctcagcgaagacacctccggcaaattctctgtagacaagttgaaattcgataaactttacaaaatgctgactgaaatttacaccgaagacaacttcgttaagttctttaaagttctgaaccgcaaaacctatctgaacttcgacaaggcagtattcaaaatcaacatcgtgccgaaagttaactacactatctacgatggtttcaacctgcgtaacaccaacctggctgctaattttaacggccagaacacggaaatcaacaacatgaacttcacaaaactgaaaaacttcactggtctgttcgagttttacaagctgctgtgcgtcgacggcatcattacctccaaaactaaatctctgatagaaggtagatttggcggtttcacgggcgcacgcaaatcagcgcgtaaattagctaaccaggcgctagcgggcggtggcggtagcggcggtggcggtagcggcggtggcggtagcgcactagtgctgcagtgtatcaaggttaacaactgggatttattcttcagcccgagtgaagacaacttcaccaacgacctgaacaaaggtgaagaaatcacctcagatactaacatcgaagcagccgaagaaaacatctcgctggacctgatccagcagtactacctgacctttaatttcgacaacgagccggaaaacatttctatcgaaaacctgagctctgatatcatcggccagctggaactgatgccgaacatcgaacgtttcccaaacggtaaaaagtacgagctggacaaatataccatgttccactacctgcgcgcgcaggaatttgaacacggcaaatcccgtatcgcactgactaactccgttaacgaagctctgctcaacccgtcccgtgtatacaccttcttctctagcgactacgtgaaaaaggtcaacaaagcgactgaagctgcaatgttcttgggttgggttgaacagcttgtttatgattttaccgacgagacgtccgaagtatctactaccgacaaaattgcggatatcactatcatcatcccgtacatcggtccggctctgaacattggcaacatgctgtacaaagacgacttcgttggcgcactgatcttctccggtgcggtgatcctgctggagttcatcccggaaatcgccatcccggtactgggcacctttgctctggtttcttacattgcaaacaaggttctgactgtacaaaccatcgacaacgcgctgagcaaacgtaacgaaaaatgggatgaagtttacaaatatatcgtgaccaactggctggctaaggttaatactcagatcgacctcatccgcaaaaaaatgaaagaagcactggaaaaccaggcggaagctaccaaggcaatcattaactaccagtacaaccagtacaccgaggaagaaaaaaacaacatcaacttcaacatcgacgatctgtcctctaaactgaacgaatccatcaacaaagctatgatcaacatcaacaagttcctgaaccagtgctctgtaagctatctgatgaactccatgatcccgtacggtgttaaacgtctggaggacttcgatgcgtctctgaaagacgccctgctgaaatacatttacgacaaccgtggcactctgatcggtcaggttgatcgtctgaaggacaaagtgaacaataccttatcgaccgacatcccttttcagctcagtaaatatgtcgataaccaacgccttttgtccactctagactag

SEQ ID NO: 14 - protein, 902 aa, Artificial Sequence
  Synthetic
GSMEFVNKQFNYKDPVNGVDIAYIKIPNAGQMQPVKAFKIHNKIWVIPERDTFTNPEEGDLNPPPEAKQVPVSYYDSTYLSTDNEKDNYLKGVTKLFERIYSTDLGRMLLTSIVRGIPFWGGSTIDTELKVIDTNCINVIQPDGSYRSEELNLVIIGPSADIIQFECKSFGHEVLNLTRNGYGSTQYIRFSPDFTFGFEESLEVDTNPLLGAGKFATDPAVTLAHELIHAGHRLYGIAINPNRVFKVNTNAYYEMSGLEVSFEELRTFGGHDAKFIDSLQENEFRLYYYNKFKDIASTLNKAKSIVGTTASLQYMKNVFKEKYLLSEDTSGKFSVDKLKFDKLYKMLTEIYTEDNFVKFFKVLNRKTYLNFDKAVFKINIVPKVNYTIYDGFNLRNTNLAANFNGQNTEINNMNFTKLKNFTGLFEFYKLLCVDGIITSKTKSLIEGRFGGFTGARKSARKLANQALAGGGGSGGGGSGGGGSALVLQCIKVNNWDLFFSPSEDNFTNDLNKGEEITSDTNIEAAEENISLDLIQQYYLTFNFDNEPENISIENLSSDIIGQLELMPNIERFPNGKKYELDKYTMFHYLRAQEFEHGKSRIALTNSVNEALLNPSRVYTFFSSDYVKKVNKATEAAMFLGWVEQLVYDFTDETSEVSTTDKIADITIIIPYIGPALNIGNMLYKDDFVGALIFSGAVILLEFIPEIAIPVLGTFALVSYIANKVLTVQTIDNALSKRNEKWDEVYKYIVTNWLAKVNTQIDLIRKKMKEALENQAEATKAIINYQYNQYTEEEKNNINFNIDDLSSKLNESINKAMININKFLNQCSVSYLMNSMIPYGVKRLEDFDASLKDALLKYIYDNRGTLIGQVDRLKDKVNNTLSTDIPFQLSKYVDNQRLLSTLD

SEQ ID NO: 15 - DNA, 2736 bp, Artificial Sequence
  Synthetic
ctcgggattgagggtcgttttggcggtttcacgggcgcacgcaaatcagcgcgtaaattagctaaccagactagtggcggtgggggtagtggcggtggcggttcgggcgggggtgggagccctaggggatccatggagttcgttaacaaacagttcaactataaagacccagttaacggtgttgacattgcttacatcaaaatcccgaacgctggccagatgcagccggtaaaggcattcaaaatccacaacaaaatctgggttatcccggaacgtgatacctttactaacccggaagaaggtgacctgaacccgccaccggaagcgaaacaggtgccggtatcttactatgactccacctacctgtctaccgataacgaaaaggacaactacctgaaaggtgttactaaactgttcgagcgtatttactccaccgacctgggccgtatgctgctgactagcatcgttcgcggtatcccgttctggggcggttctaccatcgataccgaactgaaagtaatcgacactaactgcatcaacgttattcagccggacggttcctatcgttccgaagaactgaacctggtgatcatcggcccgtctgctgatatcatccagttcgagtgtaagagctttggtcacgaagttctgaacctcacccgtaacggctacggttccactcagtacatccgtttctctccggacttcaccttcggttttgaagaatccctggaagtagacacgaacccactgctgggcgctggtaaattcgcaactgatcctgcggttaccctggctcacgaactgattcatgcaggccaccgcctgtacggtatcgccatcaatccgaaccgtgtcttcaaagttaacaccaacgcgtattacgagatgtccggtctggaagttagcttcgaagaactgcgtacttttggcggtcacgacgctaaattcatcgactctctgcaagaaaacgagttccgtctgtactactataacaagttcaaagatatcgcatccaccctgaacaaagcgaaatccatcgtgggtaccactgcttctctccagtacatgaagaacgtttttaaagaaaaatacctgctcagcgaagacacctccggcaaattctctgtagacaagttgaaattcgataaactttacaaaatgctgactgaaatttacaccgaagacaacttcgttaagttctttaaagttctgaaccgcaaaacctatctgaacttcgacaaggcagtattcaaaatcaacatcgtgccgaaagttaactacactatctacgatggtttcaacctgcgtaacaccaacctggctgctaattttaacggccagaacacggaaatcaacaacatgaacttcacaaaactgaaaaacttcactggtctgttcgagttttacaagctgctgtgcgtcgacggcatcattacctccaaaactaaatctctgatagaaggtagaaacaaagcgctgaacgacctctgtatcaaggttaacaactgggatttattcttcagcccgagtgaagacaacttcaccaacgacctgaacaaaggtgaagaaatcacctcagatactaacatcgaagcagccgaagaaaacatctcgctggacctgatccagcagtactacctgacctttaatttcgacaacgagccggaaaacatttctatcgaaaacctgagctctgatatcatcggccagctggaactgatgccgaacatcgaacgtttcccaaacggtaaaaagtacgagctggacaaatataccatgttccactacctgcgcgcgcaggaatttgaacacggcaaatcccgtatcgcactgactaactccgttaacgaagctctgctcaacccgtcccgtgtatacaccttcttctctagcgactacgtgaaaaaggtcaacaaagcgactgaagctgcaatgttcttgggttgggttgaacagcttgtttatgattttaccgacgagacgtccgaagtatctactaccgacaaaattgcggatatcactatcatcatcccgtacatcggtccggctctgaacattggcaacatgctgtacaaagacgacttcgttggcgcactgatcttctccggtgcggtgatcctgctggagttcatcccggaaatcgccatcccggtactgggcacctttgctctggtttcttacattgcaaacaaggttctgactgtacaaaccatcgacaacgcgctgagcaaacgtaacgaaaaatgggatgaagtttacaaatatatcgtgaccaactggctggctaaggttaatactcagatcgacctcatccgcaaaaaaatgaaagaagcactggaaaaccaggcggaagctaccaaggcaatcattaactaccagtacaaccagtacaccgaggaagaaaaaaacaacatcaacttcaacatcgacgatctgtcctctaaactgaacgaatccatcaacaaagctatgatcaacatcaacaagttcctgaaccagtgctctgtaagctatctgatgaactccatgatcccgtacggtgttaaacgtctggaggacttcgatgcgtctctgaaagacgccctgctgaaatacatttacgacaaccgtggcactctgatcggtcaggttgatcgtctgaaggacaaagtgaacaataccttatcgaccgacatcccttttcagctcagtaaatatgtcgataaccaacgccttttgtccactctagactag

SEQ ID NO: 16 - protein, 911 aa, Artificial Sequence
  Synthetic
LGIEGRFGGFTGARKSARKLANQTSGGGGSGGGGSGGGGSPRGSMEFVNKQFNYKDPVNGVDIAYIKIPNAGQMQPVKAFKIHNKIWVIPERDTFTNPEEGDLNPPPEAKQVPVSYYDSTYLSTDNEKDNYLKGVTKLFERIYSTDLGRMLLTSIVRGIPFWGGSTIDTELKVIDTNCINVIQPDGSYRSEELNLVIIGPSADIIQFECKSFGHEVLNLTRNGYGSTQYIRFSPDFTFGFEESLEVDTNPLLGAGKFATDPAVTLAHELIHAGHRLYGIAINPNRVFKVNTNAYYEMSGLEVSFEELRTFGGHDAKFIDSLQENEFRLYYYNKFKDIASTLNKAKSIVGTTASLQYMKNVFKEKYLLSEDTSGKFSVDKLKFDKLYKMLTEIYTEDNFVKFFKVLNRKTYLNFDKAVFKINIVPKVNYTIYDGFNLRNTNLAANFNGQNTEINNMNFTKLKNFTGLFEFYKLLCVDGIITSKTKSLIEGRNKALNDLCIKVNNWDLFFSPSEDNFTNDLNKGEEITSDTNIEAAEENISLDLIQQYYLTFNFDNEPENISIENLSSDIIGQLELMPNIERFPNGKKYELDKYTMFHYLRAQEFEHGKSRIALTNSVNEALLNPSRVYTFFSSDYVKKVNKATEAAMFLGWVEQLVYDFTDETSEVSTTDKIADITIIIPYIGPALNIGNMLYKDDFVGALIFSGAVILLEFIPEIAIPVLGTFALVSYIANKVLTVQTIDNALSKRNEKWDEVYKYIVTNWLAKVNTQIDLIRKKMKEALENQAEATKAIINYQYNQYTEEEKNNINFNIDDLSSKLNESINKAMININKFLNQCSVSYLMNSMIPYGVKRLEDFDASLKDALLKYIYDNRGTLIGQVDRLKDKVNNTLSTDIPFQLSKYVDNQRLLSTLD

SEQ ID NO: 17 - DNA, 2715 bp, Artificial Sequence
  Synthetic
ggatccgaattcatgccgatcaccatcaacaacttcaactacagcgatccggtggataacaaaaacatcctgtacctggatacccatctgaataccctggcgaacgaaccggaaaaagcgtttcgtatcaccggcaacatttgggttattccggatcgttttagccgtaacagcaacccgaatctgaataaaccgccgcgtgttaccagcccgaaaagcggttattacgatccgaactatctgagcaccgatagcgataaagataccttcctgaaagaaatcatcaaactgttcaaacgcatcaacagccgtgaaattggcgaagaactgatctatcgcctgagcaccgatattccgtttccgggcaacaacaacaccccgatcaacacctttgatttcgatgtggatttcaacagcgttgatgttaaaacccgccagggtaacaattgggtgaaaaccggcagcattaacccgagcgtgattattaccggtccgcgcgaaaacattattgatccggaaaccagcacctttaaactgaccaacaacacctttgcggcgcaggaaggttttggcgcgctgagcattattagcattagcccgcgctttatgctgacctatagcaacgcgaccaacgatgttggtgaaggccgtttcagcaaaagcgaattttgcatggacccgatcctgatcctgatgcatgaactgaaccatgcgatgcataacctgtatggcatcgcgattccgaacgatcagaccattagcagcgtgaccagcaacatcttttacagccagtacaacgtgaaactggaatatgcggaaatctatgcgtttggcggtccgaccattgatctgattccgaaaagcgcgcgcaaatacttcgaagaaaaagcgctggattactatcgcagcattgcgaaacgtctgaacagcattaccaccgcgaatccgagcagcttcaacaaatatatcggcgaatataaacagaaactgatccgcaaatatcgctttgtggtggaaagcagcggcgaagttaccgttaaccgcaataaattcgtggaactgtacaacgaactgacccagatcttcaccgaatttaactatgcgaaaatctataacgtgcagaaccgtaaaatctacctgagcaacgtgtataccccggtgaccgcgaatattctggatgataacgtgtacgatatccagaacggctttaacatcccgaaaagcaacctgaacgttctgtttatgggccagaacctgagccgtaatccggcgctgcgtaaagtgaacccggaaaacatgctgtacctgttcaccaaattttgcgtcgacgcgatagatggtagatttggcggtttcacgggcgcacgcaaatcagcgcgtaaattagctaaccaggcgctagcgggcggtggcggtagcggcggtggcggtagcggcggtggcggtagcgcactagtgctgcagtgtcgtgaactgctggtgaaaaacaccgatctgccgtttattggcgatatcagcgatgtgaaaaccgatatcttcctgcgcaaagatatcaacgaagaaaccgaagtgatctactacccggataacgtgagcgttgatcaggtgatcctgagcaaaaacaccagcgaacatggtcagctggatctgctgtatccgagcattgatagcgaaagcgaaattctgccgggcgaaaaccaggtgttttacgataaccgtacccagaacgtggattacctgaacagctattactacctggaaagccagaaactgagcgataacgtggaagattttacctttacccgcagcattgaagaagcgctggataacagcgcgaaagtttacacctattttccgaccctggcgaacaaagttaatgcgggtgttcagggcggtctgtttctgatgtgggcgaacgatgtggtggaagatttcaccaccaacatcctgcgtaaagataccctggataaaatcagcgatgttagcgcgattattccgtatattggtccggcgctgaacattagcaatagcgtgcgtcgtggcaattttaccgaagcgtttgcggttaccggtgtgaccattctgctggaagcgtttccggaatttaccattccggcgctgggtgcgtttgtgatctatagcaaagtgcaggaacgcaacgaaatcatcaaaaccatcgataactgcctggaacagcgtattaaacgctggaaagatagctatgaatggatgatgggcacctggctgagccgtattatcacccagttcaacaacatcagctaccagatgtacgatagcctgaactatcaggcgggtgcgattaaagcgaaaatcgatctggaatacaaaaaatacagcggcagcgataaagaaaacatcaaaagccaggttgaaaacctgaaaaacagcctggatgtgaaaattagcgaagcgatgaataacatcaacaaattcatccgcgaatgcagcgtgacctacctgttcaaaaacatgctgccgaaagtgatcgatgaactgaacgaatttgatcgcaacaccaaagcgaaactgatcaacctgatcgatagccacaacattattctggtgggcgaagtggataaactgaaagcgaaagttaacaacagcttccagaacaccatcccgtttaacatcttcagctataccaacaacagcctgctgaaagatatcatcaacgaatacttcaatctagactag

SEQ ID NO: 18 - protein, 904 aa, Artificial Sequence
  Synthetic
GSEFMPITINNFNYSDPVDNKNILYLDTHLNTLANEPEKAFRITGNIWVIPDRFSRNSNPNLNKPPRVTSPKSGYYDPNYLSTDSDKDTFLKEIIKLFKRINSREIGEELIYRLSTDIPFPGNNNTPINTFDFDVDFNSVDVKTRQGNNWVKTGSINPSVIITGPRENIIDPETSTFKLTNNTFAAQEGFGALSIISISPRFMLTYSNATNDVGEGRFSKSEFCMDPILILMHELNHAMHNLYGIAIPNDQTISSVTSNIFYSQYNVKLEYAEIYAFGGPTIDLIPKSARKYFEEKALDYYRSIAKRLNSITTANPSSFNKYIGEYKQKLIRKYRFVVESSGEVTVNRNKFVELYNELTQIFTEFNYAKIYNVQNRKIYLSNVYTPVTANILDDNVYDIQNGFNIPKSNLNVLFMGQNLSRNPALRKVNPENMLYLFTKFCVDAIDGRFGGFTGARKSARKLANQALAGGGGSGGGGSGGGGSALVLQCRELLVKNTDLPFIGDISDVKTDIFLRKDINEETEVIYYPDNVSVDQVILSKNTSEHGQLDLLYPSIDSESEILPGENQVFYDNRTQNVDYLNSYYYLESQKLSDNVEDFTFTRSIEEALDNSAKVYTYFPTLANKVNAGVQGGLFLMWANDVVEDFTTNILRKDTLDKISDVSAIIPYIGPALNISNSVRRGNFTEAFAVTGVTILLEAFPEFTIPALGAFVIYSKVQERNEIIKTIDNCLEQRIKRWKDSYEWMMGTWLSRIITQFNNISYQMYDSLNYQAGAIKAKIDLEYKKYSGSDKENIKSQVENLKNSLDVKISEAMNNINKFIRECSVTYLFKNMLPKVIDELNEFDRNTKAKLINLIDSHNIILVGEVDKLKAKVNNSFQNTIPFNIFSYTNNSLLKDIINEYFNLD

SEQ ID NO: 19 - DNA, 2742 bp, Artificial Sequence
  Synthetic
ggatccgaattcatgccgatcaccatcaacaacttcaactacagcgatccggtggataacaaaaacatcctgtacctggatacccatctgaataccctggcgaacgaaccggaaaaagcgtttcgtatcaccggcaacatttgggttattccggatcgttttagccgtaacagcaacccgaatctgaataaaccgccgcgtgttaccagcccgaaaagcggttattacgatccgaactatctgagcaccgatagcgataaagataccttcctgaaagaaatcatcaaactgttcaaacgcatcaacagccgtgaaattggcgaagaactgatctatcgcctgagcaccgatattccgtttccgggcaacaacaacaccccgatcaacacctttgatttcgatgtggatttcaacagcgttgatgttaaaacccgccagggtaacaattgggtgaaaaccggcagcattaacccgagcgtgattattaccggtccgcgcgaaaacattattgatccggaaaccagcacctttaaactgaccaacaacacctttgcggcgcaggaaggttttggcgcgctgagcattattagcattagcccgcgctttatgctgacctatagcaacgcgaccaacgatgttggtgaaggccgtttcagcaaaagcgaattttgcatggacccgatcctgatcctgatgcatgaactgaaccatgcgatgcataacctgtatggcatcgcgattccgaacgatcagaccattagcagcgtgaccagcaacatcttttacagccagtacaacgtgaaactggaatatgcggaaatctatgcgtttggcggtccgaccattgatctgattccgaaaagcgcgcgcaaatacttcgaagaaaaagcgctggattactatcgcagcattgcgaaacgtctgaacagcattaccaccgcgaatccgagcagcttcaacaaatatatcggcgaatataaacagaaactgatccgcaaatatcgctttgtggtggaaagcagcggcgaagttaccgttaaccgcaataaattcgtggaactgtacaacgaactgacccagatcttcaccgaatttaactatgcgaaaatctataacgtgcagaaccgtaaaatctacctgagcaacgtgtataccccggtgaccgcgaatattctggatgataacgtgtacgatatccagaacggctttaacatcccgaaaagcaacctgaacgttctgtttatgggccagaacctgagccgtaatccggcgctgcgtaaagtgaacccggaaaacatgctgtacctgttcaccaaattttgcgtcgacggcatcattacctccaaaactaaatctctgatagaaggtagatttggcggtttcacgggcgcacgcaaatcagcgcgtaaattagctaaccaggcgctagcgggcggtggcggtagcggcggtggcggtagcggcggtggcggtagcgcactagtgctgcagtgtcgtgaactgctggtgaaaaacaccgatctgccgtttattggcgatatcagcgatgtgaaaaccgatatcttcctgcgcaaagatatcaacgaagaaaccgaagtgatctactacccggataacgtgagcgttgatcaggtgatcctgagcaaaaacaccagcgaacatggtcagctggatctgctgtatccgagcattgatagcgaaagcgaaattctgccgggcgaaaaccaggtgttttacgataaccgtacccagaacgtggattacctgaacagctattactacctggaaagccagaaactgagcgataacgtggaagattttacctttacccgcagcattgaagaagcgctggataacagcgcgaaagtttacacctattttccgaccctggcgaacaaagttaatgcgggtgttcagggcggtctgtttctgatgtgggcgaacgatgtggtggaagatttcaccaccaacatcctgcgtaaagataccctggataaaatcagcgatgttagcgcgattattccgtatattggtccggcgctgaacattagcaatagcgtgcgtcgtggcaattttaccgaagcgtttgcggttaccggtgtgaccattctgctggaagcgtttccggaatttaccattccggcgctgggtgcgtttgtgatctatagcaaagtgcaggaacgcaacgaaatcatcaaaaccatcgataactgcctggaacagcgtattaaacgctggaaagatagctatgaatggatgatgggcacctggctgagccgtattatcacccagttcaacaacatcagctaccagatgtacgatagcctgaactatcaggcgggtgcgattaaagcgaaaatcgatctggaatacaaaaaatacagcggcagcgataaagaaaacatcaaaagccaggttgaaaacctgaaaaacagcctggatgtgaaaattagcgaagcgatgaataacatcaacaaattcatccgcgaatgcagcgtgacctacctgttcaaaaacatgctgccgaaagtgatcgatgaactgaacgaatttgatcgcaacaccaaagcgaaactgatcaacctgatcgatagccacaacattattctggtgggcgaagtggataaactgaaagcgaaagttaacaacagcttccagaacaccatcccgtttaacatcttcagctataccaacaacagcctgctgaaagatatcatcaacgaatacttcaatctagactag

SEQ ID NO: 20 - protein, 913 aa, Artificial Sequence
  Synthetic
GSEFMPITINNFNYSDPVDNKNILYLDTHLNTLANEPEKAFRITGNIWVIPDRFSRNSNPNLNKPPRVTSPKSGYYDPNYLSTDSDKDTFLKEIIKLFKRINSREIGEELIYRLSTDIPFPGNNNTPINTFDFDVDFNSVDVKTRQGNNWVKTGSINPSVIITGPRENIIDPETSTFKLTNNTFAAQEGFGALSIISISPRFMLTYSNATNDVGEGRFSKSEFCMDPILILMHELNHAMHNLYGIAIPNDQTISSVTSNIFYSQYNVKLEYAEIYAFGGPTIDLIPKSARKYFEEKALDYYRSIAKRLNSITTANPSSFNKYIGEYKQKLIRKYRFVVESSGEVTVNRNKFVELYNELTQIFTEFNYAKIYNVQNRKIYLSNVYTPVTANILDDNVYDIQNGFNIPKSNLNVLFMGQNLSRNPALRKVNPENMLYLFTKFCVDGIITSKTKSLIEGRFGGFTGARKSARKLANQALAGGGGSGGGGSGGGGSALVLQCRELLVKNTDLPFIGDISDVKTDIFLRKDINEETEVIYYPDNVSVDQVILSKNTSEHGQLDLLYPSIDSESEILPGENQVFYDNRTQNVDYLNSYYYLESQKLSDNVEDFTFTRSIEEALDNSAKVYTYFPTLANKVNAGVQGGLFLMWANDVVEDFTTNILRKDTLDKISDVSAIIPYIGPALNISNSVRRGNFTEAFAVTGVTILLEAFPEFTIPALGAFVIYSKVQERNEIIKTIDNCLEQRIKRWKDSYEWMMGTWLSRIITQFNNISYQMYDSLNYQAGAIKAKIDLEYKKYSGSDKENIKSQVENLKNSLDVKISEAMNNINKFIRECSVTYLFKNMLPKVIDELNEFDRNTKAKLINLIDSHNIILVGEVDKLKAKVNNSFQNTIPFNIFSYTNNSLLKDIINEYFNLD

SEQ ID NO: 21 - DNA, 2673 bp, Artificial Sequence
  Synthetic
ggatccatggagttcgttaacaaacagttcaactataaagacccagttaacggtgttgacattgcttacatcaaaatcccgaacgctggccagatgcagccggtaaaggcattcaaaatccacaacaaaatctgggttatcccggaacgtgatacctttactaacccggaagaaggtgacctgaacccgccaccggaagcgaaacaggtgccggtatcttactatgactccacctacctgtctaccgataacgaaaaggacaactacctgaaaggtgttactaaactgttcgagcgtatttactccaccgacctgggccgtatgctgctgactagcatcgttcgcggtatcccgttctggggcggttctaccatcgataccgaactgaaagtaatcgacactaactgcatcaacgttattcagccggacggttcctatcgttccgaagaactgaacctggtgatcatcggcccgtctgctgatatcatccagttcgagtgtaagagctttggtcacgaagttctgaacctcacccgtaacggctacggttccactcagtacatccgtttctctccggacttcaccttcggttttgaagaatccctggaagtagacacgaacccactgctgggcgctggtaaattcgcaactgatcctgcggttaccctggctcacgaactgattcatgcaggccaccgcctgtacggtatcgccatcaatccgaaccgtgtcttcaaagttaacaccaacgcgtattacgagatgtccggtctggaagttagcttcgaagaactgcgtacttttggcggtcacgacgctaaattcatcgactctctgcaagaaaacgagttccgtctgtactactataacaagttcaaagatatcgcatccaccctgaacaaagcgaaatccatcgtgggtaccactgcttctctccagtacatgaagaacgtttttaaagaaaaatacctgctcagcgaagacacctccggcaaattctctgtagacaagttgaaattcgataaactttacaaaatgctgactgaaatttacaccgaagacaacttcgttaagttctttaaagttctgaaccgcaaaacctatctgaacttcgacaaggcagtattcaaaatcaacatcgtgccgaaagttaactacactatctacgatggtttcaacctgcgtaacaccaacctggctgctaattttaacggccagaacacggaaatcaacaacatgaacttcacaaaactgaaaaacttcactggtctgttcgagttttacaagctgctgtgcgtcgacggcatcattacctccaaaactaaatctctgatagaaggtagatacggtggtttcatggcgctagcgggcggtggcggtagcggcggtggcggtagcggcggtggcggtagcgcactagtgctgcagtgtatcaaggttaacaactgggatttattcttcagcccgagtgaagacaacttcaccaacgacctgaacaaaggtgaagaaatcacctcagatactaacatcgaagcagccgaagaaaacatctcgctggacctgatccagcagtactacctgacctttaatttcgacaacgagccggaaaacatttctatcgaaaacctgagctctgatatcatcggccagctggaactgatgccgaacatcgaacgtttcccaaacggtaaaaagtacgagctggacaaatataccatgttccactacctgcgcgcgcaggaatttgaacacggcaaatcccgtatcgcactgactaactccgttaacgaagctctgctcaacccgtcccgtgtatacaccttcttctctagcgactacgtgaaaaaggtcaacaaagcgactgaagctgcaatgttcttgggttgggttgaacagcttgtttatgattttaccgacgagacgtccgaagtatctactaccgacaaaattgcggatatcactatcatcatcccgtacatcggtccggctctgaacattggcaacatgctgtacaaagacgacttcgttggcgcactgatcttctccggtgcggtgatcctgctggagttcatcccggaaatcgccatcccggtactgggcacctttgctctggtttcttacattgcaaacaaggttctgactgtacaaaccatcgacaacgcgctgagcaaacgtaacgaaaaatgggatgaagtttacaaatatatcgtgaccaactggctggctaaggttaatactcagatcgacctcatccgcaaaaaaatgaaagaagcactggaaaaccaggcggaagctaccaaggcaatcattaactaccagtacaaccagtacaccgaggaagaaaaaaacaacatcaacttcaacatcgacgatctgtcctctaaactgaacgaatccatcaacaaagctatgatcaacatcaacaagttcctgaaccagtgctctgtaagctatctgatgaactccatgatcccgtacggtgttaaacgtctggaggacttcgatgcgtctctgaaagacgccctgctgaaatacatttacgacaaccgtggcactctgatcggtcaggttgatcgtctgaaggacaaagtgaacaataccttatcgaccgacatcccttttcagctcagtaaatatgtcgataaccaacgccttttgtccactctagactag

SEQ ID NO: 22 - protein, 890 aa, Artificial Sequence
  Synthetic
GSMEFVNKQFNYKDPVNGVDIAYIKIPNAGQMQPVKAFKIHNKIWVIPERDTFTNPEEGDLNPPPEAKQVPVSYYDSTYLSTDNEKDNYLKGVTKLFERIYSTDLGRMLLTSIVRGIPFWGGSTIDTELKVIDTNCINVIQPDGSYRSEELNLVIIGPSADIIQFECKSFGHEVLNLTRNGYGSTQYIRFSPDFTFGFEESLEVDTNPLLGAGKFATDPAVTLAHELIHAGHRLYGIAINPNRVFKVNTNAYYEMSGLEVSFEELRTFGGHDAKFIDSLQENEFRLYYYNKFKDIASTLNKAKSIVGTTASLQYMKNVFKEKYLLSEDTSGKFSVDKLKFDKLYKMLTEIYTEDNFVKFFKVLNRKTYLNFDKAVFKINIVPKVNYTIYDGFNLRNTNLAANFNGQNTEINNMNFTKLKNFTGLFEFYKLLCVDGIITSKTKSLIEGRYGGFMALAGGGGSGGGGSGGGGSALVLQCIKVNNWDLFFSPSEDNFTNDLNKGEEITSDTNIEAAEENISLDLIQQYYLTFNFDNEPENISIENLSSDIIGQLELMPNIERFPNGKKYELDKYTMFHYLRAQEFEHGKSRIALTNSVNEALLNPSRVYTFFSSDYVKKVNKATEAAMFLGWVEQLVYDFTDETSEVSTTDKIADITIIIPYIGPALNIGNMLYKDDFVGALIFSGAVILLEFIPEIAIPVLGTFALVSYIANKVLTVQTIDNALSKRNEKWDEVYKYIVTNWLAKVNTQIDLIRKKMKEALENQAEATKAIINYQYNQYTEEEKNNINFNIDDLSSKLNESINKAMININKFLNQCSVSYLMNSMIPYGVKRLEDFDASLKDALLKYIYDNRGTLIGQVDRLKDKVNNTLSTDIPFQLSKYVDNQRLLSTLD

SEQ ID NO: 23 - DNA, 2751 bp, Artificial Sequence
  Synthetic
ggatccatggagttcgttaacaaacagttcaactataaagacccagttaacggtgttgacattgcttacatcaaaatcccgaacgctggccagatgcagccggtaaaggcattcaaaatccacaacaaaatctgggttatcccggaacgtgatacctttactaacccggaagaaggtgacctgaacccgccaccggaagcgaaacaggtgccggtatcttactatgactccacctacctgtctaccgataacgaaaaggacaactacctgaaaggtgttactaaactgttcgagcgtatttactccaccgacctgggccgtatgctgctgactagcatcgttcgcggtatcccgttctggggcggttctaccatcgataccgaactgaaagtaatcgacactaactgcatcaacgttattcagccggacggttcctatcgttccgaagaactgaacctggtgatcatcggcccgtctgctgatatcatccagttcgagtgtaagagctttggtcacgaagttctgaacctcacccgtaacggctacggttccactcagtacatccgtttctctccggacttcaccttcggttttgaagaatccctggaagtagacacgaacccactgctgggcgctggtaaattcgcaactgatcctgcggttaccctggctcacgaactgattcatgcaggccaccgcctgtacggtatcgccatcaatccgaaccgtgtcttcaaagttaacaccaacgcgtattacgagatgtccggtctggaagttagcttcgaagaactgcgtacttttggcggtcacgacgctaaattcatcgactctctgcaagaaaacgagttccgtctgtactactataacaagttcaaagatatcgcatccaccctgaacaaagcgaaatccatcgtgggtaccactgcttctctccagtacatgaagaacgtttttaaagaaaaatacctgctcagcgaagacacctccggcaaattctctgtagacaagttgaaattcgataaactttacaaaatgctgactgaaatttacaccgaagacaacttcgttaagttctttaaagttctgaaccgcaaaacctatctgaacttcgacaaggcagtattcaaaatcaacatcgtgccgaaagttaactacactatctacgatggtttcaacctgcgtaacaccaacctggctgctaattttaacggccagaacacggaaatcaacaacatgaacttcacaaaactgaaaaacttcactggtctgttcgagttttacaagctgctgtgcgtcgacggcatcattacctccaaaactaaatctctgatcgaaggtcgttacggtggtttcatgacctctgaaaaatctcagaccccgctggttaccctgttcaaaaacgctatcatcaaaaacgcttacaaaaaaggtgaagcgctagcgggtggtggtggttctggtggtggtggttctggtggtggtggttctgcactagtgctgcagtgtatcaaggttaacaactgggatttattcttcagcccgagtgaagacaacttcaccaacgacctgaacaaaggtgaagaaatcacctcagatactaacatcgaagcagccgaagaaaacatctcgctggacctgatccagcagtactacctgacctttaatttcgacaacgagccggaaaacatttctatcgaaaacctgagctctgatatcatcggccagctggaactgatgccgaacatcgaacgtttcccaaacggtaaaaagtacgagctggacaaatataccatgttccactacctgcgcgcgcaggaatttgaacacggcaaatcccgtatcgcactgactaactccgttaacgaagctctgctcaacccgtcccgtgtatacaccttcttctctagcgactacgtgaaaaaggtcaacaaagcgactgaagctgcaatgttcttgggttgggttgaacagcttgtttatgattttaccgacgagacgtccgaagtatctactaccgacaaaattgcggatatcactatcatcatcccgtacatcggtccggctctgaacattggcaacatgctgtacaaagacgacttcgttggcgcactgatcttctccggtgcggtgatcctgctggagttcatcccggaaatcgccatcccggtactgggcacctttgctctggtttcttacattgcaaacaaggttctgactgtacaaaccatcgacaacgcgctgagcaaacgtaacgaaaaatgggatgaagtttacaaatatatcgtgaccaactggctggctaaggttaatactcagatcgacctcatccgcaaaaaaatgaaagaagcactggaaaaccaggcggaagctaccaaggcaatcattaactaccagtacaaccagtacaccgaggaagaaaaaaacaacatcaacttcaacatcgacgatctgtcctctaaactgaacgaatccatcaacaaagctatgatcaacatcaacaagttcctgaaccagtgctctgtaagctatctgatgaactccatgatcccgtacggtgttaaacgtctggaggacttcgatgcgtctctgaaagacgccctgctgaaatacatttacgacaaccgtggcactctgatcggtcaggttgatcgtctgaaggacaaagtgaacaataccttatcgaccgacatcccttttcagctcagtaaatatgtcgataaccaacgccttttgtccactctagactag

SEQ ID NO: 24 - protein, 916 aa, Artificial Sequence
  Synthetic
GSMEFVNKQFNYKDPVNGVDIAYIKIPNAGQMQPVKAFKIHNKIWVIPERDTFTNPEEGDLNPPPEAKQVPVSYYDSTYLSTDNEKDNYLKGVTKLFERIYSTDLGRMLLTSIVRGIPFWGGSTIDTELKVIDTNCINVIQPDGSYRSEELNLVIIGPSADIIQFECKSFGHEVLNLTRNGYGSTQYIRFSPDFTFGFEESLEVDTNPLLGAGKFATDPAVTLAHELIHAGHRLYGIAINPNRVFKVNTNAYYEMSGLEVSFEELRTFGGHDAKFIDSLQENEFRLYYYNKFKDIASTLNKAKSIVGTTASLQYMKNVFKEKYLLSEDTSGKFSVDKLKFDKLYKMLTEIYTEDNFVKFFKVLNRKTYLNFDKAVFKINIVPKVNYTIYDGFNLRNTNLAANFNGQNTEINNMNFTKLKNFTGLFEFYKLLCVDGIITSKTKSLIEGRYGGFMTSEKSQTPLVTLFKNAIIKNAYKKGEALAGGGGSGGGGSGGGGSALVLQCIKVNNWDLFFSPSEDNFTNDLNKGEEITSDTNIEAAEENISLDLIQQYYLTFNFDNEPENISIENLSSDIIGQLELMPNIERFPNGKKYELDKYTMFHYLRAQEFEHGKSRIALTNSVNEALLNPSRVYTFFSSDYVKKVNKATEAAMFLGWVEQLVYDFTDETSEVSTTDKIADITIIIPYIGPALNIGNMLYKDDFVGALIFSGAVILLEFIPEIAIPVLGTFALVSYIANKVLTVQTIDNALSKRNEKWDEVYKYIVTNWLAKVNTQIDLIRKKMKEALENQAEATKAIINYQYNQYTEEEKNNINFNIDDLSSKLNESINKAMININKFLNQCSVSYLMNSMIPYGVKRLEDFDASLKDALLKYIYDNRGTLIGQVDRLKDKVNNTLSTDIPFQLSKYVDNQRLLSTLD

SEQ ID NO: 25 - DNA, 2709 bp, Artificial Sequence
  Synthetic
ggatccatggagttcgttaacaaacagttcaactataaagacccagttaacggtgttgacattgcttacatcaaaatcccgaacgctggccagatgcagccggtaaaggcattcaaaatccacaacaaaatctgggttatcccggaacgtgatacctttactaacccggaagaaggtgacctgaacccgccaccggaagcgaaacaggtgccggtatcttactatgactccacctacctgtctaccgataacgaaaaggacaactacctgaaaggtgttactaaactgttcgagcgtatttactccaccgacctgggccgtatgctgctgactagcatcgttcgcggtatcccgttctggggcggttctaccatcgataccgaactgaaagtaatcgacactaactgcatcaacgttattcagccggacggttcctatcgttccgaagaactgaacctggtgatcatcggcccgtctgctgatatcatccagttcgagtgtaagagctttggtcacgaagttctgaacctcacccgtaacggctacggttccactcagtacatccgtttctctccggacttcaccttcggttttgaagaatccctggaagtagacacgaacccactgctgggcgctggtaaattcgcaactgatcctgcggttaccctggctcacgaactgattcatgcaggccaccgcctgtacggtatcgccatcaatccgaaccgtgtcttcaaagttaacaccaacgcgtattacgagatgtccggtctggaagttagcttcgaagaactgcgtacttttggcggtcacgacgctaaattcatcgactctctgcaagaaaacgagttccgtctgtactactataacaagttcaaagatatcgcatccaccctgaacaaagcgaaatccatcgtgggtaccactgcttctctccagtacatgaagaacgtttttaaagaaaaatacctgctcagcgaagacacctccggcaaattctctgtagacaagttgaaattcgataaactttacaaaatgctgactgaaatttacaccgaagacaacttcgttaagttctttaaagttctgaaccgcaaaacctatctgaacttcgacaaggcagtattcaaaatcaacatcgtgccgaaagttaactacactatctacgatggtttcaacctgcgtaacaccaacctggctgctaattttaacggccagaacacggaaatcaacaacatgaacttcacaaaactgaaaaacttcactggtctgttcgagttttacaagctgctgtgcgtcgacggcatcattacctccaaaactaaatctctgatagaaggtagatttggcggtttcacgggcgcacgcaaatcagcgcgtaaacgtaagaaccaggcgctagcgggcggtggcggtagcggcggtggcggtagcggcggtggcggtagcgcactagtgctgcagtgtatcaaggttaacaactgggatttattcttcagcccgagtgaagacaacttcaccaacgacctgaacaaaggtgaagaaatcacctcagatactaacatcgaagcagccgaagaaaacatctcgctggacctgatccagcagtactacctgacctttaatttcgacaacgagccggaaaacatttctatcgaaaacctgagctctgatatcatcggccagctggaactgatgccgaacatcgaacgtttcccaaacggtaaaaagtacgagctggacaaatataccatgttccactacctgcgcgcgcaggaatttgaacacggcaaatcccgtatcgcactgactaactccgttaacgaagctctgctcaacccgtcccgtgtatacaccttcttctctagcgactacgtgaaaaaggtcaacaaagcgactgaagctgcaatgttcttgggttgggttgaacagcttgtttatgattttaccgacgagacgtccgaagtatctactaccgacaaaattgcggatatcactatcatcatcccgtacatcggtccggctctgaacattggcaacatgctgtacaaagacgacttcgttggcgcactgatcttctccggtgcggtgatcctgctggagttcatcccggaaatcgccatcccggtactgggcacctttgctctggtttcttacattgcaaacaaggttctgactgtacaaaccatcgacaacgcgctgagcaaacgtaacgaaaaatgggatgaagtttacaaatatatcgtgaccaactggctggctaaggttaatactcagatcgacctcatccgcaaaaaaatgaaagaagcactggaaaaccaggcggaagctaccaaggcaatcattaactaccagtacaaccagtacaccgaggaagaaaaaaacaacatcaacttcaacatcgacgatctgtcctctaaactgaacgaatccatcaacaaagctatgatcaacatcaacaagttcctgaaccagtgctctgtaagctatctgatgaactccatgatcccgtacggtgttaaacgtctggaggacttcgatgcgtctctgaaagacgccctgctgaaatacatttacgacaaccgtggcactctgatcggtcaggttgatcgtctgaaggacaaagtgaacaataccttatcgaccgacatcccttttcagctcagtaaatatgtcgataaccaacgccttttgtccactctagactag

SEQ ID NO: 26 - protein, 902 aa, Artificial Sequence
  Synthetic
GSMEFVNKQFNYKDPVNGVDIAYIKIPNAGQMQPVKAFKIHNKIWVIPERDTFTNPEEGDLNPPPEAKQVPVSYYDSTYLSTDNEKDNYLKGVTKLFERIYSTDLGRMLLTSIVRGIPFWGGSTIDTELKVIDTNCINVIQPDGSYRSEELNLVIIGPSADIIQFECKSFGHEVLNLTRNGYGSTQYIRFSPDFTFGFEESLEVDTNPLLGAGKFATDPAVTLAHELIHAGHRLYGIAINPNRVFKVNTNAYYEMSGLEVSFEELRTFGGHDAKFIDSLQENEFRLYYYNKFKDIASTLNKAKSIVGTTASLQYMKNVFKEKYLLSEDTSGKFSVDKLKFDKLYKMLTEIYTEDNFVKFFKVLNRKTYLNFDKAVFKINIVPKVNYTIYDGFNLRNTNLAANFNGQNTEINNMNFTKLKNFTGLFEFYKLLCVDGIITSKTKSLIEGRFGGFTGARKSARKRKNQALAGGGGSGGGGSGGGGSALVLQCIKVNNWDLFFSPSEDNFTNDLNKGEEITSDTNIEAAEENISLDLIQQYYLTFNFDNEPENISIENLSSDIIGQLELMPNIERFPNGKKYELDKYTMFHYLRAQEFEHGKSRIALTNSVNEALLNPSRVYTFFSSDYVKKVNKATEAAMFLGWVEQLVYDFTDETSEVSTTDKIADITIIIPYIGPALNIGNMLYKDDFVGALIFSGAVILLEFIPEIAIPVLGTFALVSYIANKVLTVQTIDNALSKRNEKWDEVYKYIVTNWLAKVNTQIDLIRKKMKEALENQAEATKAIINYQYNQYTEEEKNNINFNIDDLSSKLNESINKAMININKFLNQCSVSYLMNSMIPYGVKRLEDFDASLKDALLKYIYDNRGTLIGQVDRLKDKVNNTLSTDIPFQLSKYVDNQRLLSTLD

SEQ ID NO: 27 - DNA, 2691 bp, Artificial Sequence
  Synthetic
ggatccatggagttcgttaacaaacagttcaactataaagacccagttaacggtgttgacattgcttacatcaaaatcccgaacgctggccagatgcagccggtaaaggcattcaaaatccacaacaaaatctgggttatcccggaacgtgatacctttactaacccggaagaaggtgacctgaacccgccaccggaagcgaaacaggtgccggtatcttactatgactccacctacctgtctaccgataacgaaaaggacaactacctgaaaggtgttactaaactgttcgagcgtatttactccaccgacctgggccgtatgctgctgactagcatcgttcgcggtatcccgttctggggcggttctaccatcgataccgaactgaaagtaatcgacactaactgcatcaacgttattcagccggacggttcctatcgttccgaagaactgaacctggtgatcatcggcccgtctgctgatatcatccagttcgagtgtaagagctttggtcacgaagttctgaacctcacccgtaacggctacggttccactcagtacatccgtttctctccggacttcaccttcggttttgaagaatccctggaagtagacacgaacccactgctgggcgctggtaaattcgcaactgatcctgcggttaccctggctcacgaactgattcatgcaggccaccgcctgtacggtatcgccatcaatccgaaccgtgtcttcaaagttaacaccaacgcgtattacgagatgtccggtctggaagttagcttcgaagaactgcgtacttttggcggtcacgacgctaaattcatcgactctctgcaagaaaacgagttccgtctgtactactataacaagttcaaagatatcgcatccaccctgaacaaagcgaaatccatcgtgggtaccactgcttctctccagtacatgaagaacgtttttaaagaaaaatacctgctcagcgaagacacctccggcaaattctctgtagacaagttgaaattcgataaactttacaaaatgctgactgaaatttacaccgaagacaacttcgttaagttctttaaagttctgaaccgcaaaacctatctgaacttcgacaaggcagtattcaaaatcaacatcgtgccgaaagttaactacactatctacgatggtttcaacctgcgtaacaccaacctggctgctaattttaacggccagaacacggaaatcaacaacatgaacttcacaaaactgaaaaacttcactggtctgttcgagttttacaagctgctgtgcgtcgacggcatcattacctccaaaactaaatctctgatagaaggtagatttggcggtttcacgggcgcacgcaaatcagcggcgctagcgggcggtggcggtagcggcggtggcggtagcggcggtggcggtagcgcactagtgctgcagtgtatcaaggttaacaactgggatttattcttcagcccgagtgaagacaacttcaccaacgacctgaacaaaggtgaagaaatcacctcagatactaacatcgaagcagccgaagaaaacatctcgctggacctgatccagcagtactacctgacctttaatttcgacaacgagccggaaaacatttctatcgaaaacctgagctctgatatcatcggccagctggaactgatgccgaacatcgaacgtttcccaaacggtaaaaagtacgagctggacaaatataccatgttccactacctgcgcgcgcaggaatttgaacacggcaaatcccgtatcgcactgactaactccgttaacgaagctctgctcaacccgtcccgtgtatacaccttcttctctagcgactacgtgaaaaaggtcaacaaagcgactgaagctgcaatgttcttgggttgggttgaacagcttgtttatgattttaccgacgagacgtccgaagtatctactaccgacaaaattgcggatatcactatcatcatcccgtacatcggtccggctctgaacattggcaacatgctgtacaaagacgacttcgttggcgcactgatcttctccggtgcggtgatcctgctggagttcatcccggaaatcgccatcccggtactgggcacctttgctctggtttcttacattgcaaacaaggttctgactgtacaaaccatcgacaacgcgctgagcaaacgtaacgaaaaatgggatgaagtttacaaatatatcgtgaccaactggctggctaaggttaatactcagatcgacctcatccgcaaaaaaatgaaagaagcactggaaaaccaggcggaagctaccaaggcaatcattaactaccagtacaaccagtacaccgaggaagaaaaaaacaacatcaacttcaacatcgacgatctgtcctctaaactgaacgaatccatcaacaaagctatgatcaacatcaacaagttcctgaaccagtgctctgtaagctatctgatgaactccatgatcccgtacggtgttaaacgtctggaggacttcgatgcgtctctgaaagacgccctgctgaaatacatttacgacaaccgtggcactctgatcggtcaggttgatcgtctgaaggacaaagtgaacaataccttatcgaccgacatcccttttcagctcagtaaatatgtcgataaccaacgccttttgtccactctagactag

SEQ ID NO: 28 - protein, 896 aa, Artificial Sequence
  Synthetic
GSMEFVNKQFNYKDPVNGVDIAYIKIPNAGQMQPVKAFKIHNKIWVIPERDTFTNPEEGDLNPPPEAKQVPVSYYDSTYLSTDNEKDNYLKGVTKLFERIYSTDLGRMLLTSIVRGIPFWGGSTIDTELKVIDTNCINVIQPDGSYRSEELNLVIIGPSADIIQFECKSFGHEVLNLTRNGYGSTQYIRFSPDFTFGFEESLEVDTNPLLGAGKFATDPAVTLAHELIHAGHRLYGIAINPNRVFKVNTNAYYEMSGLEVSFEELRTFGGHDAKFIDSLQENEFRLYYYNKFKDIASTLNKAKSIVGTTASLQYMKNVFKEKYLLSEDTSGKFSVDKLKFDKLYKMLTEIYTEDNFVKFFKVLNRKTYLNFDKAVFKINIVPKVNYTIYDGFNLRNTNLAANFNGQNTEINNMNFTKLKNFTGLFEFYKLLCVDGIITSKTKSLIEGRFGGFTGARKSAALAGGGGSGGGGSGGGGSALVLQCIKVNNWDLFFSPSEDNFTNDLNKGEEITSDTNIEAAEENISLDLIQQYYLTFNFDNEPENISIENLSSDIIGQLELMPNIERFPNGKKYELDKYTMFHYLRAQEFEHGKSRIALTNSVNEALLNPSRVYTFFSSDYVKKVNKATEAAMFLGWVEQLVYDFTDETSEVSTTDKIADITIIIPYIGPALNIGNMLYKDDFVGALIFSGAVILLEFIPEIAIPVLGTFALVSYIANKVLTVQTIDNALSKRNEKWDEVYKYIVTNWLAKVNTQIDLIRKKMKEALENQAEATKAIINYQYNQYTEEEKNNINFNIDDLSSKLNESINKAMININKFLNQCSVSYLMNSMIPYGVKRLEDFDASLKDALLKYIYDNRGTLIGQVDRLKDKVNNTLSTDIPFQLSKYVDNQRLLSTLD

SEQ ID NO: 29 - DNA, 2691 bp, Artificial Sequence
  Synthetic
ggatccatggagttcgttaacaaacagttcaactataaagacccagttaacggtgttgacattgcttacatcaaaatcccgaacgctggccagatgcagccggtaaaggcattcaaaatccacaacaaaatctgggttatcccggaacgtgatacctttactaacccggaagaaggtgacctgaacccgccaccggaagcgaaacaggtgccggtatcttactatgactccacctacctgtctaccgataacgaaaaggacaactacctgaaaggtgttactaaactgttcgagcgtatttactccaccgacctgggccgtatgctgctgactagcatcgttcgcggtatcccgttctggggcggttctaccatcgataccgaactgaaagtaatcgacactaactgcatcaacgttattcagccggacggttcctatcgttccgaagaactgaacctggtgatcatcggcccgtctgctgatatcatccagttcgagtgtaagagctttggtcacgaagttctgaacctcacccgtaacggctacggttccactcagtacatccgtttctctccggacttcaccttcggttttgaagaatccctggaagtagacacgaacccactgctgggcgctggtaaattcgcaactgatcctgcggttaccctggctcacgaactgattcatgcaggccaccgcctgtacggtatcgccatcaatccgaaccgtgtcttcaaagttaacaccaacgcgtattacgagatgtccggtctggaagttagcttcgaagaactgcgtacttttggcggtcacgacgctaaattcatcgactctctgcaagaaaacgagttccgtctgtactactataacaagttcaaagatatcgcatccaccctgaacaaagcgaaatccatcgtgggtaccactgcttctctccagtacatgaagaacgtttttaaagaaaaatacctgctcagcgaagacacctccggcaaattctctgtagacaagttgaaattcgataaactttacaaaatgctgactgaaatttacaccgaagacaacttcgttaagttctttaaagttctgaaccgcaaaacctatctgaacttcgacaaggcagtattcaaaatcaacatcgtgccgaaagttaactacactatctacgatggtttcaacctgcgtaacaccaacctggctgctaattttaacggccagaacacggaaatcaacaacatgaacttcacaaaactgaaaaacttcactggtctgttcgagttttacaagctgctgtgcgtcgacggcatcattacctccaaaactaaatctctgatagaaggtagatttggcggtttcacgggcgcacgcaaatatgcggcgctagcgggcggtggcggtagcggcggtggcggtagcggcggtggcggtagcgcactagtgctgcagtgtatcaaggttaacaactgggatttattcttcagcccgagtgaagacaacttcaccaacgacctgaacaaaggtgaagaaatcacctcagatactaacatcgaagcagccgaagaaaacatctcgctggacctgatccagcagtactacctgacctttaatttcgacaacgagccggaaaacatttctatcgaaaacctgagctctgatatcatcggccagctggaactgatgccgaacatcgaacgtttcccaaacggtaaaaagtacgagctggacaaatataccatgttccactacctgcgcgcgcaggaatttgaacacggcaaatcccgtatcgcactgactaactccgttaacgaagctctgctcaacccgtcccgtgtatacaccttcttctctagcgactacgtgaaaaaggtcaacaaagcgactgaagctgcaatgttcttgggttgggttgaacagcttgtttatgattttaccgacgagacgtccgaagtatctactaccgacaaaattgcggatatcactatcatcatcccgtacatcggtccggctctgaacattggcaacatgctgtacaaagacgacttcgttggcgcactgatcttctccggtgcggtgatcctgctggagttcatcccggaaatcgccatcccggtactgggcacctttgctctggtttcttacattgcaaacaaggttctgactgtacaaaccatcgacaacgcgctgagcaaacgtaacgaaaaatgggatgaagtttacaaatatatcgtgaccaactggctggctaaggttaatactcagatcgacctcatccgcaaaaaaatgaaagaagcactggaaaaccaggcggaagctaccaaggcaatcattaactaccagtacaaccagtacaccgaggaagaaaaaaacaacatcaacttcaacatcgacgatctgtcctctaaactgaacgaatccatcaacaaagctatgatcaacatcaacaagttcctgaaccagtgctctgtaagctatctgatgaactccatgatcccgtacggtgttaaacgtctggaggacttcgatgcgtctctgaaagacgccctgctgaaatacatttacgacaaccgtggcactctgatcggtcaggttgatcgtctgaaggacaaagtgaacaataccttatcgaccgacatcccttttcagctcagtaaatatgtcgataaccaacgccttttgtccactctagactag

SEQ ID NO: 30 - protein, 896 aa, Artificial Sequence
  Synthetic
GSMEFVNKQFNYKDPVNGVDIAYIKIPNAGQMQPVKAFKIHNKIWVIPERDTFTNPEEGDLNPPPEAKQVPVSYYDSTYLSTDNEKDNYLKGVTKLFERIYSTDLGRMLLTSIVRGIPFWGGSTIDTELKVIDTNCINVIQPDGSYRSEELNLVIIGPSADIIQFECKSFGHEVLNLTRNGYGSTQYIRFSPDFTFGFEESLEVDTNPLLGAGKFATDPAVTLAHELIHAGHRLYGIAINPNRVFKVNTNAYYEMSGLEVSFEELRTFGGHDAKFIDSLQENEFRLYYYNKFKDIASTLNKAKSIVGTTASLQYMKNVFKEKYLLSEDTSGKFSVDKLKFDKLYKMLTEIYTEDNFVKFFKVLNRKTYLNFDKAVFKINIVPKVNYTIYDGFNLRNTNLAANFNGQNTEINNMNFTKLKNFTGLFEFYKLLCVDGIITSKTKSLIEGRFGGFTGARKYAALAGGGGSGGGGSGGGGSALVLQCIKVNNWDLFFSPSEDNFTNDLNKGEEITSDTNIEAAEENISLDLIQQYYLTFNFDNEPENISIENLSSDIIGQLELMPNIERFPNGKKYELDKYTMFHYLRAQEFEHGKSRIALTNSVNEALLNPSRVYTFFSSDYVKKVNKATEAAMFLGWVEQLVYDFTDETSEVSTTDKIADITIIIPYIGPALNIGNMLYKDDFVGALIFSGAVILLEFIPEIAIPVLGTFALVSYIANKVLTVQTIDNALSKRNEKWDEVYKYIVTNWLAKVNTQIDLIRKKMKEALENQAEATKAIINYQYNQYTEEEKNNINFNIDDLSSKLNESINKAMININKFLNQCSVSYLMNSMIPYGVKRLEDFDASLKDALLKYIYDNRGTLIGQVDRLKDKVNNTLSTDIPFQLSKYVDNQRLLSTLD

SEQ ID NO: 31 - DNA, 2691 bp, Artificial Sequence
  Synthetic
ggatccatggagttcgttaacaaacagttcaactataaagacccagttaacggtgttgacattgcttacatcaaaatcccgaacgctggccagatgcagccggtaaaggcattcaaaatccacaacaaaatctgggttatcccggaacgtgatacctttactaacccggaagaaggtgacctgaacccgccaccggaagcgaaacaggtgccggtatcttactatgactccacctacctgtctaccgataacgaaaaggacaactacctgaaaggtgttactaaactgttcgagcgtatttactccaccgacctgggccgtatgctgctgactagcatcgttcgcggtatcccgttctggggcggttctaccatcgataccgaactgaaagtaatcgacactaactgcatcaacgttattcagccggacggttcctatcgttccgaagaactgaacctggtgatcatcggcccgtctgctgatatcatccagttcgagtgtaagagctttggtcacgaagttctgaacctcacccgtaacggctacggttccactcagtacatccgtttctctccggacttcaccttcggttttgaagaatccctggaagtagacacgaacccactgctgggcgctggtaaattcgcaactgatcctgcggttaccctggctcacgaactgattcatgcaggccaccgcctgtacggtatcgccatcaatccgaaccgtgtcttcaaagttaacaccaacgcgtattacgagatgtccggtctggaagttagcttcgaagaactgcgtacttttggcggtcacgacgctaaattcatcgactctctgcaagaaaacgagttccgtctgtactactataacaagttcaaagatatcgcatccaccctgaacaaagcgaaatccatcgtgggtaccactgcttctctccagtacatgaagaacgtttttaaagaaaaatacctgctcagcgaagacacctccggcaaattctctgtagacaagttgaaattcgataaactttacaaaatgctgactgaaatttacaccgaagacaacttcgttaagttctttaaagttctgaaccgcaaaacctatctgaacttcgacaaggcagtattcaaaatcaacatcgtgccgaaagttaactacactatctacgatggtttcaacctgcgtaacaccaacctggctgctaattttaacggccagaacacggaaatcaacaacatgaacttcacaaaactgaaaaacttcactggtctgttcgagttttacaagctgctgtgcgtcgacggcatcattacctccaaaactaaatctctgatagaaggtagatttggcggtttcacgggcgcacgcaaatcatatgcgctagcgggcggtggcggtagcggcggtggcggtagcggcggtggcggtagcgcactagtgctgcagtgtatcaaggttaacaactgggatttattcttcagcccgagtgaagacaacttcaccaacgacctgaacaaaggtgaagaaatcacctcagatactaacatcgaagcagccgaagaaaacatctcgctggacctgatccagcagtactacctgacctttaatttcgacaacgagccggaaaacatttctatcgaaaacctgagctctgatatcatcggccagctggaactgatgccgaacatcgaacgtttcccaaacggtaaaaagtacgagctggacaaatataccatgttccactacctgcgcgcgcaggaatttgaacacggcaaatcccgtatcgcactgactaactccgttaacgaagctctgctcaacccgtcccgtgtatacaccttcttctctagcgactacgtgaaaaaggtcaacaaagcgactgaagctgcaatgttcttgggttgggttgaacagcttgtttatgattttaccgacgagacgtccgaagtatctactaccgacaaaattgcggatatcactatcatcatcccgtacatcggtccggctctgaacattggcaacatgctgtacaaagacgacttcgttggcgcactgatcttctccggtgcggtgatcctgctggagttcatcccggaaatcgccatcccggtactgggcacctttgctctggtttcttacattgcaaacaaggttctgactgtacaaaccatcgacaacgcgctgagcaaacgtaacgaaaaatgggatgaagtttacaaatatatcgtgaccaactggctggctaaggttaatactcagatcgacctcatccgcaaaaaaatgaaagaagcactggaaaaccaggcggaagctaccaaggcaatcattaactaccagtacaaccagtacaccgaggaagaaaaaaacaacatcaacttcaacatcgacgatctgtcctctaaactgaacgaatccatcaacaaagctatgatcaacatcaacaagttcctgaaccagtgctctgtaagctatctgatgaactccatgatcccgtacggtgttaaacgtctggaggacttcgatgcgtctctgaaagacgccctgctgaaatacatttacgacaaccgtggcactctgatcggtcaggttgatcgtctgaaggacaaagtgaacaataccttatcgaccgacatcccttttcagctcagtaaatatgtcgataaccaacgccttttgtccactctagactag

SEQ ID NO: 32 - protein, 896 aa, Artificial Sequence
  Synthetic
GSMEFVNKQFNYKDPVNGVDIAYIKIPNAGQMQPVKAFKIHNKIWVIPERDTFTNPEEGDLNPPPEAKQVPVSYYDSTYLSTDNEKDNYLKGVTKLFERIYSTDLGRMLLTSIVRGIPFWGGSTIDTELKVIDTNCINVIQPDGSYRSEELNLVIIGPSADIIQFECKSFGHEVLNLTRNGYGSTQYIRFSPDFTFGFEESLEVDTNPLLGAGKFATDPAVTLAHELIHAGHRLYGIAINPNRVFKVNTNAYYEMSGLEVSFEELRTFGGHDAKFIDSLQENEFRLYYYNKFKDIASTLNKAKSIVGTTASLQYMKNVFKEKYLLSEDTSGKFSVDKLKFDKLYKMLTEIYTEDNFVKFFKVLNRKTYLNFDKAVFKINIVPKVNYTIYDGFNLRNTNLAANFNGQNTEINNMNFTKLKNFTGLFEFYKLLCVDGIITSKTKSLIEGRFGGFTGARKSYALAGGGGSGGGGSGGGGSALVLQCIKVNNWDLFFSPSEDNFTNDLNKGEEITSDTNIEAAEENISLDLIQQYYLTFNFDNEPENISIENLSSDIIGQLELMPNIERFPNGKKYELDKYTMFHYLRAQEFEHGKSRIALTNSVNEALLNPSRVYTFFSSDYVKKVNKATEAAMFLGWVEQLVYDFTDETSEVSTTDKIADITIIIPYIGPALNIGNMLYKDDFVGALIFSGAVILLEFIPEIAIPVLGTFALVSYIANKVLTVQTIDNALSKRNEKWDEVYKYIVTNWLAKVNTQIDLIRKKMKEALENQAEATKAIINYQYNQYTEEEKNNINFNIDDLSSKLNESINKAMININKFLNQCSVSYLMNSMIPYGVKRLEDFDASLKDALLKYIYDNRGTLIGQVDRLKDKVNNTLSTDIPFQLSKYVDNQRLLSTLD

SEQ ID NO: 33 - DNA, 2709 bp, Artificial Sequence
  Synthetic
ggatccatggagttcgttaacaaacagttcaactataaagacccagttaacggtgttgacattgcttacatcaaaatcccgaacgctggccagatgcagccggtaaaggcattcaaaatccacaacaaaatctgggttatcccggaacgtgatacctttactaacccggaagaaggtgacctgaacccgccaccggaagcgaaacaggtgccggtatcttactatgactccacctacctgtctaccgataacgaaaaggacaactacctgaaaggtgttactaaactgttcgagcgtatttactccaccgacctgggccgtatgctgctgactagcatcgttcgcggtatcccgttctggggcggttctaccatcgataccgaactgaaagtaatcgacactaactgcatcaacgttattcagccggacggttcctatcgttccgaagaactgaacctggtgatcatcggcccgtctgctgatatcatccagttcgagtgtaagagctttggtcacgaagttctgaacctcacccgtaacggctacggttccactcagtacatccgtttctctccggacttcaccttcggttttgaagaatccctggaagtagacacgaacccactgctgggcgctggtaaattcgcaactgatcctgcggttaccctggctcacgaactgattcatgcaggccaccgcctgtacggtatcgccatcaatccgaaccgtgtcttcaaagttaacaccaacgcgtattacgagatgtccggtctggaagttagcttcgaagaactgcgtacttttggcggtcacgacgctaaattcatcgactctctgcaagaaaacgagttccgtctgtactactataacaagttcaaagatatcgcatccaccctgaacaaagcgaaatccatcgtgggtaccactgcttctctccagtacatgaagaacgtttttaaagaaaaatacctgctcagcgaagacacctccggcaaattctctgtagacaagttgaaattcgataaactttacaaaatgctgactgaaatttacaccgaagacaacttcgttaagttctttaaagttctgaaccgcaaaacctatctgaacttcgacaaggcagtattcaaaatcaacatcgtgccgaaagttaactacactatctacgatggtttcaacctgcgtaacaccaacctggctgctaattttaacggccagaacacggaaatcaacaacatgaacttcacaaaactgaaaaacttcactggtctgttcgagttttacaagctgctgtgcgtcgacggcatcattacctccaaaactaaatctctgatagaaggtagatttggcggtttcacgggcgcacgcaaatcagcgcgtaaatatgctaaccaggcgctagcgggcggtggcggtagcggcggtggcggtagcggcggtggcggtagcgcactagtgctgcagtgtatcaaggttaacaactgggatttattcttcagcccgagtgaagacaacttcaccaacgacctgaacaaaggtgaagaaatcacctcagatactaacatcgaagcagccgaagaaaacatctcgctggacctgatccagcagtactacctgacctttaatttcgacaacgagccggaaaacatttctatcgaaaacctgagctctgatatcatcggccagctggaactgatgccgaacatcgaacgtttcccaaacggtaaaaagtacgagctggacaaatataccatgttccactacctgcgcgcgcaggaatttgaacacggcaaatcccgtatcgcactgactaactccgttaacgaagctctgctcaacccgtcccgtgtatacaccttcttctctagcgactacgtgaaaaaggtcaacaaagcgactgaagctgcaatgttcttgggttgggttgaacagcttgtttatgattttaccgacgagacgtccgaagtatctactaccgacaaaattgcggatatcactatcatcatcccgtacatcggtccggctctgaacattggcaacatgctgtacaaagacgacttcgttggcgcactgatcttctccggtgcggtgatcctgctggagttcatcccggaaatcgccatcccggtactgggcacctttgctctggtttcttacattgcaaacaaggttctgactgtacaaaccatcgacaacgcgctgagcaaacgtaacgaaaaatgggatgaagtttacaaatatatcgtgaccaactggctggctaaggttaatactcagatcgacctcatccgcaaaaaaatgaaagaagcactggaaaaccaggcggaagctaccaaggcaatcattaactaccagtacaaccagtacaccgaggaagaaaaaaacaacatcaacttcaacatcgacgatctgtcctctaaactgaacgaatccatcaacaaagctatgatcaacatcaacaagttcctgaaccagtgctctgtaagctatctgatgaactccatgatcccgtacggtgttaaacgtctggaggacttcgatgcgtctctgaaagacgccctgctgaaatacatttacgacaaccgtggcactctgatcggtcaggttgatcgtctgaaggacaaagtgaacaataccttatcgaccgacatcccttttcagctcagtaaatatgtcgataaccaacgccttttgtccactctagactag

SEQ ID NO: 34 - protein, 902 aa, Artificial Sequence
  Synthetic
GSMEFVNKQFNYKDPVNGVDIAYIKIPNAGQMQPVKAFKIHNKIWVIPERDTFTNPEEGDLNPPPEAKQVPVSYYDSTYLSTDNEKDNYLKGVTKLFERIYSTDLGRMLLTSIVRGIPFWGGSTIDTELKVIDTNCINVIQPDGSYRSEELNLVIIGPSADIIQFECKSFGHEVLNLTRNGYGSTQYIRFSPDFTFGFEESLEVDTNPLLGAGKFATDPAVTLAHELIHAGHRLYGIAINPNRVFKVNTNAYYEMSGLEVSFEELRTFGGHDAKFIDSLQENEFRLYYYNKFKDIASTLNKAKSIVGTTASLQYMKNVFKEKYLLSEDTSGKFSVDKLKFDKLYKMLTEIYTEDNFVKFFKVLNRKTYLNFDKAVFKINIVPKVNYTIYDGFNLRNTNLAANFNGQNTEINNMNFTKLKNFTGLFEFYKLLCVDGIITSKTKSLIEGRFGGFTGARKSARKYANQALAGGGGSGGGGSGGGGSALVLQCIKVNNWDLFFSPSEDNFTNDLNKGEEITSDTNIEAAEENISLDLIQQYYLTFNFDNEPENISIENLSSDIIGQLELMPNIERFPNGKKYELDKYTMFHYLRAQEFEHGKSRIALTNSVNEALLNPSRVYTFFSSDYVKKVNKATEAAMFLGWVEQLVYDFTDETSEVSTTDKIADITIIIPYIGPALNIGNMLYKDDFVGALIFSGAVILLEFIPEIAIPVLGTFALVSYIANKVLTVQTIDNALSKRNEKWDEVYKYIVTNWLAKVNTQIDLIRKKMKEALENQAEATKAIINYQYNQYTEEEKNNINFNIDDLSSKLNESINKAMININKFLNQCSVSYLMNSMIPYGVKRLEDFDASLKDALLKYIYDNRGTLIGQVDRLKDKVNNTLSTDIPFQLSKYVDNQRLLSTLD

SEQ ID NO: 35 - DNA, 2697 bp, Artificial Sequence
  Synthetic
ggatccatggagttcgttaacaaacagttcaactataaagacccagttaacggtgttgacattgcttacatcaaaatcccgaacgctggccagatgcagccggtaaaggcattcaaaatccacaacaaaatctgggttatcccggaacgtgatacctttactaacccggaagaaggtgacctgaacccgccaccggaagcgaaacaggtgccggtatcttactatgactccacctacctgtctaccgataacgaaaaggacaactacctgaaaggtgttactaaactgttcgagcgtatttactccaccgacctgggccgtatgctgctgactagcatcgttcgcggtatcccgttctggggcggttctaccatcgataccgaactgaaagtaatcgacactaactgcatcaacgttattcagccggacggttcctatcgttccgaagaactgaacctggtgatcatcggcccgtctgctgatatcatccagttcgagtgtaagagctttggtcacgaagttctgaacctcacccgtaacggctacggttccactcagtacatccgtttctctccggacttcaccttcggttttgaagaatccctggaagtagacacgaacccactgctgggcgctggtaaattcgcaactgatcctgcggttaccctggctcacgaactgattcatgcaggccaccgcctgtacggtatcgccatcaatccgaaccgtgtcttcaaagttaacaccaacgcgtattacgagatgtccggtctggaagttagcttcgaagaactgcgtacttttggcggtcacgacgctaaattcatcgactctctgcaagaaaacgagttccgtctgtactactataacaagttcaaagatatcgcatccaccctgaacaaagcgaaatccatcgtgggtaccactgcttctctccagtacatgaagaacgtttttaaagaaaaatacctgctcagcgaagacacctccggcaaattctctgtagacaagttgaaattcgataaactttacaaaatgctgactgaaatttacaccgaagacaacttcgttaagttctttaaagttctgaaccgcaaaacctatctgaacttcgacaaggcagtattcaaaatcaacatcgtgccgaaagttaactacactatctacgatggtttcaacctgcgtaacaccaacctggctgctaattttaacggccagaacacggaaatcaacaacatgaacttcacaaaactgaaaaacttcactggtctgttcgagttttacaagctgctgtgcgtcgacggcatcattacctccaaaactaaatctctgatagaaggtagatttggcggtttcacgggcgcacgcaaatcagcgcgtaaagcgctagcgggcggtggcggtagcggcggtggcggtagcggcggtggcggtagcgcactagtgctgcagtgtatcaaggttaacaactgggatttattcttcagcccgagtgaagacaacttcaccaacgacctgaacaaaggtgaagaaatcacctcagatactaacatcgaagcagccgaagaaaacatctcgctggacctgatccagcagtactacctgacctttaatttcgacaacgagccggaaaacatttctatcgaaaacctgagctctgatatcatcggccagctggaactgatgccgaacatcgaacgtttcccaaacggtaaaaagtacgagctggacaaatataccatgttccactacctgcgcgcgcaggaatttgaacacggcaaatcccgtatcgcactgactaactccgttaacgaagctctgctcaacccgtcccgtgtatacaccttcttctctagcgactacgtgaaaaaggtcaacaaagcgactgaagctgcaatgttcttgggttgggttgaacagcttgtttatgattttaccgacgagacgtccgaagtatctactaccgacaaaattgcggatatcactatcatcatcccgtacatcggtccggctctgaacattggcaacatgctgtacaaagacgacttcgttggcgcactgatcttctccggtgcggtgatcctgctggagttcatcccggaaatcgccatcccggtactgggcacctttgctctggtttcttacattgcaaacaaggttctgactgtacaaaccatcgacaacgcgctgagcaaacgtaacgaaaaatgggatgaagtttacaaatatatcgtgaccaactggctggctaaggttaatactcagatcgacctcatccgcaaaaaaatgaaagaagcactggaaaaccaggcggaagctaccaaggcaatcattaactaccagtacaaccagtacaccgaggaagaaaaaaacaacatcaacttcaacatcgacgatctgtcctctaaactgaacgaatccatcaacaaagctatgatcaacatcaacaagttcctgaaccagtgctctgtaagctatctgatgaactccatgatcccgtacggtgttaaacgtctggaggacttcgatgcgtctctgaaagacgccctgctgaaatacatttacgacaaccgtggcactctgatcggtcaggttgatcgtctgaaggacaaagtgaacaataccttatcgaccgacatcccttttcagctcagtaaatatgtcgataaccaacgccttttgtccactctagactag

SEQ ID NO: 36 - protein, 898 aa, Artificial Sequence
  Synthetic
GSMEFVNKQFNYKDPVNGVDIAYIKIPNAGQMQPVKAFKIHNKIWVIPERDTFTNPEEGDLNPPPEAKQVPVSYYDSTYLSTDNEKDNYLKGVTKLFERIYSTDLGRMLLTSIVRGIPFWGGSTIDTELKVIDTNCINVIQPDGSYRSEELNLVIIGPSADIIQFECKSFGHEVLNLTRNGYGSTQYIRFSPDFTFGFEESLEVDTNPLLGAGKFATDPAVTLAHELIHAGHRLYGIAINPNRVFKVNTNAYYEMSGLEVSFEELRTFGGHDAKFIDSLQENEFRLYYYNKFKDIASTLNKAKSIVGTTASLQYMKNVFKEKYLLSEDTSGKFSVDKLKFDKLYKMLTEIYTEDNFVKFFKVLNRKTYLNFDKAVFKINIVPKVNYTIYDGFNLRNTNLAANFNGQNTEINNMNFTKLKNFTGLFEFYKLLCVDGIITSKTKSLIEGRFGGFTGARKSARKALAGGGGSGGGGSGGGGSALVLQCIKVNNWDLFFSPSEDNFTNDLNKGEEITSDTNIEAAEENISLDLIQQYYLTFNFDNEPENISIENLSSDIIGQLELMPNIERFPNGKKYELDKYTMFHYLRAQEFEHGKSRIALTNSVNEALLNPSRVYTFFSSDYVKKVNKATEAAMFLGWVEQLVYDFTDETSEVSTTDKIADITIIIPYIGPALNIGNMLYKDDFVGALIFSGAVILLEFIPEIAIPVLGTFALVSYIANKVLTVQTIDNALSKRNEKWDEVYKYIVTNWLAKVNTQIDLIRKKMKEALENQAEATKAIINYQYNQYTEEEKNNINFNIDDLSSKLNESINKAMININKFLNQCSVSYLMNSMIPYGVKRLEDFDASLKDALLKYIYDNRGTLIGQVDRLKDKVNNTLSTDIPFQLSKYVDNQRLLSTLD

SEQ ID NO: 37 - DNA, 51 bp, Artificial Sequence
  Synthetic
tttggcggtttcacgggcgcacgcaaatcagcgcgtaaattagctaaccag

SEQ ID NO: 38 - protein, 17 aa, Artificial Sequence
  Synthetic
FGGFTGARKSARKLANQ

SEQ ID NO: 39 - DNA, 33 bp, Artificial Sequence
  Synthetic
tttggcggtttcacgggcgcacgcaaatcagcg

SEQ ID NO: 40 - protein, 11 aa, Artificial Sequence
  Synthetic
FGGFTGARKSA

SEQ ID NO: 41 - DNA, 33 bp, Artificial Sequence
  Synthetic
tttggcggtttcacgggcgcacgcaaatatgcg

SEQ ID NO: 42 - protein, 11 aa, Artificial Sequence
  Synthetic
FGGFTGARKYA

SEQ ID NO: 43 - DNA, 33 bp, Artificial Sequence
  Synthetic
tttggcggtttcacgggcgcacgcaaatcatat

SEQ ID NO: 44 - protein, 11 aa, Artificial Sequence
  Synthetic
FGGFTGARKSY

SEQ ID NO: 45 - DNA, 51 bp, Artificial Sequence
  Synthetic
tttggcggtttcacgggcgcacgcaaatcagcgcgtaaatatgctaaccag

SEQ ID NO: 46 - protein, 17 aa, Artificial Sequence
  Synthetic
FGGFTGARKSARKYANQ

SEQ ID NO: 47 - DNA, 39 bp, Artificial Sequence
  Synthetic
tttggcggtttcacgggcgcacgcaaatcagcgcgtaaa

SEQ ID NO: 48 - protein, 13 aa, Artificial Sequence
  Synthetic
FGGFTGARKSARK

SEQ ID NO: 49 - DNA, 51 bp, Artificial Sequence
  Synthetic
tttggcggtttcacgggcgcacgcaaatcagcgcgtaaacgcaaaaaccag

SEQ ID NO: 50 - protein, 17 aa, Artificial Sequence
  Synthetic
FGGFTGARKSARKRKNQ

SEQ ID NO: 51 - DNA, 2736 bp, Artificial Sequence
  Synthetic
ctcgggattgagggtcgttttggcggtttcacgggcgcacgcaaatcagcgcgtaaattagctaaccagactagtggcggtgggggtagtggcggtggcggttcgggcgggggtgggagccctaggggatccatggagttcgttaacaaacagttcaactataaagacccagttaacggtgttgacattgcttacatcaaaatcccgaacgctggccagatgcagccggtaaaggcattcaaaatccacaacaaaatctgggttatcccggaacgtgatacctttactaacccggaagaaggtgacctgaacccgccaccggaagcgaaacaggtgccggtatcttactatgactccacctacctgtctaccgataacgaaaaggacaactacctgaaaggtgttactaaactgttcgagcgtatttactccaccgacctgggccgtatgctgctgactagcatcgttcgcggtatcccgttctggggcggttctaccatcgataccgaactgaaagtaatcgacactaactgcatcaacgttattcagccggacggttcctatcgttccgaagaactgaacctggtgatcatcggcccgtctgctgatatcatccagttcgagtgtaagagctttggtcacgaagttctgaacctcacccgtaacggctacggttccactcagtacatccgtttctctccggacttcaccttcggttttgaagaatccctggaagtagacacgaacccactgctgggcgctggtaaattcgcaactgatcctgcggttaccctggctcacgaactgattcatgcaggccaccgcctgtacggtatcgccatcaatccgaaccgtgtcttcaaagttaacaccaacgcgtattacgagatgtccggtctggaagttagcttcgaagaactgcgtacttttggcggtcacgacgctaaattcatcgactctctgcaagaaaacgagttccgtctgtactactataacaagttcaaagatatcgcatccaccctgaacaaagcgaaatccatcgtgggtaccactgcttctctccagtacatgaagaacgtttttaaagaaaaatacctgctcagcgaagacacctccggcaaattctctgtagacaagttgaaattcgataaactttacaaaatgctgactgaaatttacaccgaagacaacttcgttaagttctttaaagttctgaaccgcaaaacctatctgaacttcgacaaggcagtattcaaaatcaacatcgtgccgaaagttaactacactatctacgatggtttcaacctgcgtaacaccaacctggctgctaattttaacggccagaacacggaaatcaacaacatgaacttcacaaaactgaaaaacttcactggtctgttcgagttttacaagctgctgtgcgtcgacggcatcattacctccaaaactaaatctctgatagaaggtagaaacaaagcgctgaacctgcagtgtatcaaggttaacaactgggatttattcttcagcccgagtgaagacaacttcaccaacgacctgaacaaaggtgaagaaatcacctcagatactaacatcgaagcagccgaagaaaacatctcgctggacctgatccagcagtactacctgacctttaatttcgacaacgagccggaaaacatttctatcgaaaacctgagctctgatatcatcggccagctggaactgatgccgaacatcgaacgtttcccaaacggtaaaaagtacgagctggacaaatataccatgttccactacctgcgcgcgcaggaatttgaacacggcaaatcccgtatcgcactgactaactccgttaacgaagctctgctcaacccgtcccgtgtatacaccttcttctctagcgactacgtgaaaaaggtcaacaaagcgactgaagctgcaatgttcttgggttgggttgaacagcttgtttatgattttaccgacgagacgtccgaagtatctactaccgacaaaattgcggatatcactatcatcatcccgtacatcggtccggctctgaacattggcaacatgctgtacaaagacgacttcgttggcgcactgatcttctccggtgcggtgatcctgctggagttcatcccggaaatcgccatcccggtactgggcacctttgctctggtttcttacattgcaaacaaggttctgactgtacaaaccatcgacaacgcgctgagcaaacgtaacgaaaaatgggatgaagtttacaaatatatcgtgaccaactggctggctaaggttaatactcagatcgacctcatccgcaaaaaaatgaaagaagcactggaaaaccaggcggaagctaccaaggcaatcattaactaccagtacaaccagtacaccgaggaagaaaaaaacaacatcaacttcaacatcgacgatctgtcctctaaactgaacgaatccatcaacaaagctatgatcaacatcaacaagttcctgaaccagtgctctgtaagctatctgatgaactccatgatcccgtacggtgttaaacgtctggaggacttcgatgcgtctctgaaagacgccctgctgaaatacatttacgacaaccgtggcactctgatcggtcaggttgatcgtctgaaggacaaagtgaacaataccttatcgaccgacatcccttttcagctcagtaaatatgtcgataaccaacgccttttgtccactctagactag

SEQ ID NO: 52 - protein, 911 aa, Artificial Sequence
  Synthetic
LGIEGRFGGFTGARKSARKLANQTSGGGGSGGGGSGGGGSPRGSMEFVNKQFNYKDPVNGVDIAYIKIPNAGQMQPVKAFKIHNKIWVIPERDTFTNPEEGDLNPPPEAKQVPVSYYDSTYLSTDNEKDNYLKGVTKLFERIYSTDLGRMLLTSIVRGIPFWGGSTIDTELKVIDTNCINVIQPDGSYRSEELNLVIIGPSADIIQFECKSFGHEVLNLTRNGYGSTQYIRFSPDFTFGFEESLEVDTNPLLGAGKFATDPAVTLAHELIHAGHRLYGIAINPNRVFKVNTNAYYEMSGLEVSFEELRTFGGHDAKFIDSLQENEFRLYYYNKFKDIASTLNKAKSIVGTTASLQYMKNVFKEKYLLSEDTSGKFSVDKLKFDKLYKMLTEIYTEDNFVKFFKVLNRKTYLNFDKAVFKINIVPKVNYTIYDGFNLRNTNLAANFNGQNTEINNMNFTKLKNFTGLFEFYKLLCVDGIITSKTKSLIEGRNKALNLQCIKVNNWDLFFSPSEDNFTNDLNKGEEITSDTNIEAAEENISLDLIQQYYLTFNFDNEPENISIENLSSDIIGQLELMPNIERFPNGKKYELDKYTMFHYLRAQEFEHGKSRIALTNSVNEALLNPSRVYTFFSSDYVKKVNKATEAAMFLGWVEQLVYDFTDETSEVSTTDKIADITIIIPYIGPALNIGNMLYKDDFVGALIFSGAVILLEFIPEIAIPVLGTFALVSYIANKVLTVQTIDNALSKRNEKWDEVYKYIVTNWLAKVNTQIDLIRKKMKEALENQAEATKAIINYQYNQYTEEEKNNINFNIDDLSSKLNESINKAMININKFLNQCSVSYLMNSMIPYGVKRLEDFDASLKDALLKYIYDNRGTLIGQVDRLKDKVNNTLSTDIPFQLSKYVDNQRLLSTLD

SEQ ID NO: 53 - DNA, 177 bp, Artificial Sequence
  Synthetic
ggatccacgcacgtcgacggcatcattacctccaaaactaaatctctgatagaaggtagatttggcggtttcacgggcgcacgcaaatcagcgcgtaaattagctaaccaggcgctagcgggtggtggtggttctgcactagtgctgcagacgcacggtctagaatgataaaagctt

SEQ ID NO: 54 - DNA, 192 bp, Artificial Sequence
  Synthetic
ggatccacgcacgtcgacggcatcattacctccaaaactaaatctctgatagaaggtagatttggcggtttcacgggcgcacgcaaatcagcgcgtaaattagctaaccaggcgctagcgggtggtggtggttctggtggtggtggttctgcactagtgctgcagacgcacggtctagaatgataaaagctt

SEQ ID NO: 55 - DNA, 222 bp, Artificial Sequence
  Synthetic
ggatccacgcacgtcgacggcatcattacctccaaaactaaatctctgatagaaggtagatttggcggtttcacgggcgcacgcaaatcagcgcgtaaattagctaaccaggcgctagcgggtggtggtggttctggtggtggtggttctggtggtggtggttctggtggtggtggttctgcactagtgctgcagacgcacggtctagaatgataaaagctt

SEQ ID NO: 56 - DNA, 237 bp, Artificial Sequence
  Synthetic
ggatccacgcacgtcgacggcatcattacctccaaaactaaatctctgatagaaggtagatttggcggtttcacgggcgcacgcaaatcagcgcgtaaattagctaaccaggcgctagcgggtggtggtggttctggtggtggtggttctggtggtggtggttctggtggtggtggttctggtggtggtggttctgcactagtgctgcagacgcacggtctagaatgataaaagctt

SEQ ID NO: 57 - DNA, 228 bp, Artificial Sequence
  Synthetic
ggatccacgcacgtcgacggcatcattacctccaaaactaaatctctgatagaaggtagatttggcggtttcacgggcgcacgcaaatcagcgcgtaaattagctaaccaggcgctagcggctgaagctgctgctaaagaagctgctgctaaagaagctgctgctaaagctggtggcggtggttccgcactagtgctgcagacgcacggtctagaatgataaaagctt

SEQ ID NO: 58 - DNA, 2694 bp, Artificial Sequence
  Synthetic
ggatccatggagttcgttaacaaacagttcaactataaagacccagttaacggtgttgacattgcttacatcaaaatcccgaacgctggccagatgcagccggtaaaggcattcaaaatccacaacaaaatctgggttatcccggaacgtgatacctttactaacccggaagaaggtgacctgaacccgccaccggaagcgaaacaggtgccggtatcttactatgactccacctacctgtctaccgataacgaaaaggacaactacctgaaaggtgttactaaactgttcgagcgtatttactccaccgacctgggccgtatgctgctgactagcatcgttcgcggtatcccgttctggggcggttctaccatcgataccgaactgaaagtaatcgacactaactgcatcaacgttattcagccggacggttcctatcgttccgaagaactgaacctggtgatcatcggcccgtctgctgatatcatccagttcgagtgtaagagctttggtcacgaagttctgaacctcacccgtaacggctacggttccactcagtacatccgtttctctccggacttcaccttcggttttgaagaatccctggaagtagacacgaacccactgctgggcgctggtaaattcgcaactgatcctgcggttaccctggctcacgaactgattcatgcaggccaccgcctgtacggtatcgccatcaatccgaaccgtgtcttcaaagttaacaccaacgcgtattacgagatgtccggtctggaagttagcttcgaagaactgcgtacttttggcggtcacgacgctaaattcatcgactctctgcaagaaaacgagttccgtctgtactactataacaagttcaaagatatcgcatccaccctgaacaaagcgaaatccatcgtgggtaccactgcttctctccagtacatgaagaacgtttttaaagaaaaatacctgctcagcgaagacacctccggcaaattctctgtagacaagttgaaattcgataaactttacaaaatgctgactgaaatttacaccgaagacaacttcgttaagttctttaaagttctgaaccgcaaaacctatctgaacttcgacaaggcagtattcaaaatcaacatcgtgccgaaagttaactacactatctacgatggtttcaacctgcgtaacaccaacctggctgctaattttaacggccagaacacggaaatcaacaacatgaacttcacaaaactgaaaaacttcactggtctgttcgagttttacaagctgctgtgcgtcgacggcatcattacctccaaaactaaatctctgatagaaggtagatttggcggtttcacgggcgcacgcaaatcagcgcgtaaattagctaaccaggcgctagcgggtggtggtggttctggtggtggtggttctgcactagtgctgcagtgtatcaaggttaacaactgggatttattcttcagcccgagtgaagacaacttcaccaacgacctgaacaaaggtgaagaaatcacctcagatactaacatcgaagcagccgaagaaaacatctcgctggacctgatccagcagtactacctgacctttaatttcgacaacgagccggaaaacatttctatcgaaaacctgagctctgatatcatcggccagctggaactgatgccgaacatcgaacgtttcccaaacggtaaaaagtacgagctggacaaatataccatgttccactacctgcgcgcgcaggaatttgaacacggcaaatcccgtatcgcactgactaactccgttaacgaagctctgctcaacccgtcccgtgtatacaccttcttctctagcgactacgtgaaaaaggtcaacaaagcgactgaagctgcaatgttcttgggttgggttgaacagcttgtttatgattttaccgacgagacgtccgaagtatctactaccgacaaaattgcggatatcactatcatcatcccgtacatcggtccggctctgaacattggcaacatgctgtacaaagacgacttcgttggcgcactgatcttctccggtgcggtgatcctgctggagttcatcccggaaatcgccatcccggtactgggcacctttgctctggtttcttacattgcaaacaaggttctgactgtacaaaccatcgacaacgcgctgagcaaacgtaacgaaaaatgggatgaagtttacaaatatatcgtgaccaactggctggctaaggttaatactcagatcgacctcatccgcaaaaaaatgaaagaagcactggaaaaccaggcggaagctaccaaggcaatcattaactaccagtacaaccagtacaccgaggaagaaaaaaacaacatcaacttcaacatcgacgatctgtcctctaaactgaacgaatccatcaacaaagctatgatcaacatcaacaagttcctgaaccagtgctctgtaagctatctgatgaactccatgatcccgtacggtgttaaacgtctggaggacttcgatgcgtctctgaaagacgccctgctgaaatacatttacgacaaccgtggcactctgatcggtcaggttgatcgtctgaaggacaaagtgaacaataccttatcgaccgacatcccttttcagctcagtaaatatgtcgataaccaacgccttttgtccactctagactag

SEQ ID NO: 59 - protein, 897 aa, Artificial Sequence
  Synthetic
GSMEFVNKQFNYKDPVNGVDIAYIKIPNAGQMQPVKAFKIHNKIWVIPERDTFTNPEEGDLNPPPEAKQVPVSYYDSTYLSTDNEKDNYLKGVTKLFERIYSTDLGRMLLTSIVRGIPFWGGSTIDTELKVIDTNCINVIQPDGSYRSEELNLVIIGPSADIIQFECKSFGHEVLNLTRNGYGSTQYIRFSPDFTFGFEESLEVDTNPLLGAGKFATDPAVTLAHELIHAGHRLYGIAINPNRVFKVNTNAYYEMSGLEVSFEELRTFGGHDAKFIDSLQENEFRLYYYNKFKDIASTLNKAKSIVGTTASLQYMKNVFKEKYLLSEDTSGKFSVDKLKFDKLYKMLTEIYTEDNFVKFFKVLNRKTYLNFDKAVFKINIVPKVNYTIYDGFNLRNTNLAANFNGQNTEINNMNFTKLKNFTGLFEFYKLLCVDGIITSKTKSLIEGRFGGFTGARKSARKLANQALAGGGGSGGGGSALVLQCIKVNNWDLFFSPSEDNFTNDLNKGEEITSDTNIEAAEENISLDLIQQYYLTFNFDNEPENISIENLSSDIIGQLELMPNIERFPNGKKYELDKYTMFHYLRAQEFEHGKSRIALTNSVNEALLNPSRVYTFFSSDYVKKVNKATEAAMFLGWVEQLVYDFTDETSEVSTTDKIADITIIIPYIGPALNIGNMLYKDDFVGALIFSGAVILLEFIPEIAIPVLGTFALVSYIANKVLTVQTIDNALSKRNEKWDEVYKYIVTNWLAKVNTQIDLIRKKMKEALENQAEATKAIINYQYNQYTEEEKNNINFNIDDLSSKLNESINKAMININKFLNQCSVSYLMNSMIPYGVKRLEDFDASLKDALLKYIYDNRGTLIGQVDRLKDKVNNTLSTDIPFQLSKYVDNQRLLSTLD

SEQ ID NO: 60 - DNA, 2724 bp, Artificial Sequence
  Synthetic
ggatccatggagttcgttaacaaacagttcaactataaagacccagttaacggtgttgacattgcttacatcaaaatcccgaacgctggccagatgcagccggtaaaggcattcaaaatccacaacaaaatctgggttatcccggaacgtgatacctttactaacccggaagaaggtgacctgaacccgccaccggaagcgaaacaggtgccggtatcttactatgactccacctacctgtctaccgataacgaaaaggacaactacctgaaaggtgttactaaactgttcgagcgtatttactccaccgacctgggccgtatgctgctgactagcatcgttcgcggtatcccgttctggggcggttctaccatcgataccgaactgaaagtaatcgacactaactgcatcaacgttattcagccggacggttcctatcgttccgaagaactgaacctggtgatcatcggcccgtctgctgatatcatccagttcgagtgtaagagctttggtcacgaagttctgaacctcacccgtaacggctacggttccactcagtacatccgtttctctccggacttcaccttcggttttgaagaatccctggaagtagacacgaacccactgctgggcgctggtaaattcgcaactgatcctgcggttaccctggctcacgaactgattcatgcaggccaccgcctgtacggtatcgccatcaatccgaaccgtgtcttcaaagttaacaccaacgcgtattacgagatgtccggtctggaagttagcttcgaagaactgcgtacttttggcggtcacgacgctaaattcatcgactctctgcaagaaaacgagttccgtctgtactactataacaagttcaaagatatcgcatccaccctgaacaaagcgaaatccatcgtgggtaccactgcttctctccagtacatgaagaacgtttttaaagaaaaatacctgctcagcgaagacacctccggcaaattctctgtagacaagttgaaattcgataaactttacaaaatgctgactgaaatttacaccgaagacaacttcgttaagttctttaaagttctgaaccgcaaaacctatctgaacttcgacaaggcagtattcaaaatcaacatcgtgccgaaagttaactacactatctacgatggtttcaacctgcgtaacaccaacctggctgctaattttaacggccagaacacggaaatcaacaacatgaacttcacaaaactgaaaaacttcactggtctgttcgagttttacaagctgctgtgcgtcgacggcatcattacctccaaaactaaatctctgatagaaggtagatttggcggtttcacgggcgcacgcaaatcagcgcgtaaattagctaaccaggcgctagcgggtggtggtggttctggtggtggtggttctggtggtggtggttctggtggtggtggttctgcactagtgctgcagtgtatcaaggttaacaactgggatttattcttcagcccgagtgaagacaacttcaccaacgacctgaacaaaggtgaagaaatcacctcagatactaacatcgaagcagccgaagaaaacatctcgctggacctgatccagcagtactacctgacctttaatttcgacaacgagccggaaaacatttctatcgaaaacctgagctctgatatcatcggccagctggaactgatgccgaacatcgaacgtttcccaaacggtaaaaagtacgagctggacaaatataccatgttccactacctgcgcgcgcaggaatttgaacacggcaaatcccgtatcgcactgactaactccgttaacgaagctctgctcaacccgtcccgtgtatacaccttcttctctagcgactacgtgaaaaaggtcaacaaagcgactgaagctgcaatgttcttgggttgggttgaacagcttgtttatgattttaccgacgagacgtccgaagtatctactaccgacaaaattgcggatatcactatcatcatcccgtacatcggtccggctctgaacattggcaacatgctgtacaaagacgacttcgttggcgcactgatcttctccggtgcggtgatcctgctggagttcatcccggaaatcgccatcccggtactgggcacctttgctctggtttcttacattgcaaacaaggttctgactgtacaaaccatcgacaacgcgctgagcaaacgtaacgaaaaatgggatgaagtttacaaatatatcgtgaccaactggctggctaaggttaatactcagatcgacctcatccgcaaaaaaatgaaagaagcactggaaaaccaggcggaagctaccaaggcaatcattaactaccagtacaaccagtacaccgaggaagaaaaaaacaacatcaacttcaacatcgacgatctgtcctctaaactgaacgaatccatcaacaaagctatgatcaacatcaacaagttcctgaaccagtgctctgtaagctatctgatgaactccatgatcccgtacggtgttaaacgtctggaggacttcgatgcgtctctgaaagacgccctgctgaaatacatttacgacaaccgtggcactctgatcggtcaggttgatcgtctgaaggacaaagtgaacaataccttatcgaccgacatcccttttcagctcagtaaatatgtcgataaccaacgccttttgtccactctagactag

SEQ ID NO: 61 - protein, 907 aa, Artificial Sequence
  Synthetic
GSMEFVNKQFNYKDPVNGVDIAYIKIPNAGQMQPVKAFKIHNKIWVIPERDTFTNPEEGDLNPPPEAKQVPVSYYDSTYLSTDNEKDNYLKGVTKLFERIYSTDLGRMLLTSIVRGIPFWGGSTIDTELKVIDTNCINVIQPDGSYRSEELNLVIIGPSADIIQFECKSFGHEVLNLTRNGYGSTQYIRFSPDFTFGFEESLEVDTNPLLGAGKFATDPAVTLAHELIHAGHRLYGIAINPNRVFKVNTNAYYEMSGLEVSFEELRTFGGHDAKFIDSLQENEFRLYYYNKFKDIASTLNKAKSIVGTTASLQYMKNVFKEKYLLSEDTSGKFSVDKLKFDKLYKMLTEIYTEDNFVKFFKVLNRKTYLNFDKAVFKINIVPKVNYTIYDGFNLRNTNLAANFNGQNTEINNMNFTKLKNFTGLFEFYKLLCVDGIITSKTKSLIEGRFGGFTGARKSARKLANQALAGGGGSGGGGSGGGGSGGGGSALVLQCIKVNNWDLFFSPSEDNFTNDLNKGEEITSDTNIEAAEENISLDLIQQYYLTFNFDNEPENISIENLSSDIIGQLELMPNIERFPNGKKYELDKYTMFHYLRAQEFEHGKSRIALTNSVNEALLNPSRVYTFFSSDYVKKVNKATEAAMFLGWVEQLVYDFTDETSEVSTTDKIADITIIIPYIGPALNIGNMLYKDDFVGALIFSGAVILLEFIPEIAIPVLGTFALVSYIANKVLTVQTIDNALSKRNEKWDEVYKYIVTNWLAKVNTQIDLIRKKMKEALENQAEATKAIINYQYNQYTEEEKNNINFNIDDLSSKLNESINKAMININKFLNQCSVSYLMNSMIPYGVKRLEDFDASLKDALLKYIYDNRGTLIGQVDRLKDKVNNTLSTDIPFQLSKYVDNQRLLSTLD

SEQ ID NO: 62 - DNA, 207 bp, Artificial Sequence
  Synthetic
ggatccacgcacgtcgacggcatcattacctccaaaactaaatctgacgatgacgataaatttggcggtttcacgggcgcacgcaaatcagcgcgtaaacgtaagaaccaggcgctagcgggcggtggcggtagcggcggtggcggtagcggcggtggcggtagcgcactagtgctgcagacgcacggtctagaatgataaaagctt

SEQ ID NO: 63 - DNA, 2709 bp, Artificial Sequence
  Synthetic
ggatccatggagttcgttaacaaacagttcaactataaagacccagttaacggtgttgacattgcttacatcaaaatcccgaacgctggccagatgcagccggtaaaggcattcaaaatccacaacaaaatctgggttatcccggaacgtgatacctttactaacccggaagaaggtgacctgaacccgccaccggaagcgaaacaggtgccggtatcttactatgactccacctacctgtctaccgataacgaaaaggacaactacctgaaaggtgttactaaactgttcgagcgtatttactccaccgacctgggccgtatgctgctgactagcatcgttcgcggtatcccgttctggggcggttctaccatcgataccgaactgaaagtaatcgacactaactgcatcaacgttattcagccggacggttcctatcgttccgaagaactgaacctggtgatcatcggcccgtctgctgatatcatccagttcgagtgtaagagctttggtcacgaagttctgaacctcacccgtaacggctacggttccactcagtacatccgtttctctccggacttcaccttcggttttgaagaatccctggaagtagacacgaacccactgctgggcgctggtaaattcgcaactgatcctgcggttaccctggctcacgaactgattcatgcaggccaccgcctgtacggtatcgccatcaatccgaaccgtgtcttcaaagttaacaccaacgcgtattacgagatgtccggtctggaagttagcttcgaagaactgcgtacttttggcggtcacgacgctaaattcatcgactctctgcaagaaaacgagttccgtctgtactactataacaagttcaaagatatcgcatccaccctgaacaaagcgaaatccatcgtgggtaccactgcttctctccagtacatgaagaacgtttttaaagaaaaatacctgctcagcgaagacacctccggcaaattctctgtagacaagttgaaattcgataaactttacaaaatgctgactgaaatttacaccgaagacaacttcgttaagttctttaaagttctgaaccgcaaaacctatctgaacttcgacaaggcagtattcaaaatcaacatcgtgccgaaagttaactacactatctacgatggtttcaacctgcgtaacaccaacctggctgctaattttaacggccagaacacggaaatcaacaacatgaacttcacaaaactgaaaaacttcactggtctgttcgagttttacaagctgctgtgcgtcgacggcatcattacctccaaaactaaatctgacgatgacgataaatttggcggtttcacgggcgcacgcaaatcagcgcgtaaacgtaagaaccaggcgctagcgggcggtggcggtagcggcggtggcggtagcggcggtggcggtagcgcactagtgctgcagtgtatcaaggttaacaactgggatttattcttcagcccgagtgaagacaacttcaccaacgacctgaacaaaggtgaagaaatcacctcagatactaacatcgaagcagccgaagaaaacatctcgctggacctgatccagcagtactacctgacctttaatttcgacaacgagccggaaaacatttctatcgaaaacctgagctctgatatcatcggccagctggaactgatgccgaacatcgaacgtttcccaaacggtaaaaagtacgagctggacaaatataccatgttccactacctgcgcgcgcaggaatttgaacacggcaaatcccgtatcgcactgactaactccgttaacgaagctctgctcaacccgtcccgtgtatacaccttcttctctagcgactacgtgaaaaaggtcaacaaagcgactgaagctgcaatgttcttgggttgggttgaacagcttgtttatgattttaccgacgagacgtccgaagtatctactaccgacaaaattgcggatatcactatcatcatcccgtacatcggtccggctctgaacattggcaacatgctgtacaaagacgacttcgttggcgcactgatcttctccggtgcggtgatcctgctggagttcatcccggaaatcgccatcccggtactgggcacctttgctctggtttcttacattgcaaacaaggttctgactgtacaaaccatcgacaacgcgctgagcaaacgtaacgaaaaatgggatgaagtttacaaatatatcgtgaccaactggctggctaaggttaatactcagatcgacctcatccgcaaaaaaatgaaagaagcactggaaaaccaggcggaagctaccaaggcaatcattaactaccagtacaaccagtacaccgaggaagaaaaaaacaacatcaacttcaacatcgacgatctgtcctctaaactgaacgaatccatcaacaaagctatgatcaacatcaacaagttcctgaaccagtgctctgtaagctatctgatgaactccatgatcccgtacggtgttaaacgtctggaggacttcgatgcgtctctgaaagacgccctgctgaaatacatttacgacaaccgtggcactctgatcggtcaggttgatcgtctgaaggacaaagtgaacaataccttatcgaccgacatcccttttcagctcagtaaatatgtcgataaccaacgccttttgtccactctagactag

SEQ ID NO: 64 - protein, 902 aa, Artificial Sequence
  Synthetic
GSMEFVNKQFNYKDPVNGVDIAYIKIPNAGQMQPVKAFKIHNKIWVIPERDTFTNPEEGDLNPPPEAKQVPVSYYDSTYLSTDNEKDNYLKGVTKLFERIYSTDLGRMLLTSIVRGIPFWGGSTIDTELKVIDTNCINVIQPDGSYRSEELNLVIIGPSADIIQFECKSFGHEVLNLTRNGYGSTQYIRFSPDFTFGFEESLEVDTNPLLGAGKFATDPAVTLAHELIHAGHRLYGIAINPNRVFKVNTNAYYEMSGLEVSFEELRTFGGHDAKFIDSLQENEFRLYYYNKFKDIASTLNKAKSIVGTTASLQYMKNVFKEKYLLSEDTSGKFSVDKLKFDKLYKMLTEIYTEDNFVKFFKVLNRKTYLNFDKAVFKINIVPKVNYTIYDGFNLRNTNLAANFNGQNTEINNMNFTKLKNFTGLFEFYKLLCVDGIITSKTKSDDDDKFGGFTGARKSARKRKNQALAGGGGSGGGGSGGGGSALVLQCIKVNNWDLFFSPSEDNFTNDLNKGEEITSDTNIEAAEENISLDLIQQYYLTFNFDNEPENISIENLSSDIIGQLELMPNIERFPNGKKYELDKYTMFHYLRAQEFEHGKSRIALTNSVNEALLNPSRVYTFFSSDYVKKVNKATEAAMFLGWVEQLVYDFTDETSEVSTTDKIADITIIIPYIGPALNIGNMLYKDDFVGALIFSGAVILLEFIPEIAIPVLGTFALVSYIANKVLTVQTIDNALSKRNEKWDEVYKYIVTNWLAKVNTQIDLIRKKMKEALENQAEATKAIINYQYNQYTEEEKNNINFNIDDLSSKLNESINKAMININKFLNQCSVSYLMNSMIPYGVKRLEDFDASLKDALLKYIYDNRGTLIGQVDRLKDKVNNTLSTDIPFQLSKYVDNQRLLSTLD

SEQ ID NO: 65 - DNA, 207 bp, Artificial Sequence
  Synthetic
ggatccacgcacgtcgacggcatcattacctccaaaactaaatctctgatagaaggtagatttggcggtttcacgggcgcacgcaaatcagcgcgtaaacgtaagaaccaggcgctagcgggcggtggcggtagcggcggtggcggtagcggcggtggcggtagcgcactagtgctgcagacgcacggtctagaatgataaaagctt

SEQ ID NO: 66 - DNA, 2742 bp, Artificial Sequence
  Synthetic
ggatccgaattcatgccgatcaccatcaacaacttcaactacagcgatccggtggataacaaaaacatcctgtacctggatacccatctgaataccctggcgaacgaaccggaaaaagcgtttcgtatcaccggcaacatttgggttattccggatcgttttagccgtaacagcaacccgaatctgaataaaccgccgcgtgttaccagcccgaaaagcggttattacgatccgaactatctgagcaccgatagcgataaagataccttcctgaaagaaatcatcaaactgttcaaacgcatcaacagccgtgaaattggcgaagaactgatctatcgcctgagcaccgatattccgtttccgggcaacaacaacaccccgatcaacacctttgatttcgatgtggatttcaacagcgttgatgttaaaacccgccagggtaacaattgggtgaaaaccggcagcattaacccgagcgtgattattaccggtccgcgcgaaaacattattgatccggaaaccagcacctttaaactgaccaacaacacctttgcggcgcaggaaggttttggcgcgctgagcattattagcattagcccgcgctttatgctgacctatagcaacgcgaccaacgatgttggtgaaggccgtttcagcaaaagcgaattttgcatggacccgatcctgatcctgatgcatgaactgaaccatgcgatgcataacctgtatggcatcgcgattccgaacgatcagaccattagcagcgtgaccagcaacatcttttacagccagtacaacgtgaaactggaatatgcggaaatctatgcgtttggcggtccgaccattgatctgattccgaaaagcgcgcgcaaatacttcgaagaaaaagcgctggattactatcgcagcattgcgaaacgtctgaacagcattaccaccgcgaatccgagcagcttcaacaaatatatcggcgaatataaacagaaactgatccgcaaatatcgctttgtggtggaaagcagcggcgaagttaccgttaaccgcaataaattcgtggaactgtacaacgaactgacccagatcttcaccgaatttaactatgcgaaaatctataacgtgcagaaccgtaaaatctacctgagcaacgtgtataccccggtgaccgcgaatattctggatgataacgtgtacgatatccagaacggctttaacatcccgaaaagcaacctgaacgttctgtttatgggccagaacctgagccgtaatccggcgctgcgtaaagtgaacccggaaaacatgctgtacctgttcaccaaattttgcgtcgacggcatcattacctccaaaactaaatctctgatagaaggtagatttggcggtttcacgggcgcacgcaaatcagcgcgtaaacgtaagaaccaggcgctagcgggcggtggcggtagcggcggtggcggtagcggcggtggcggtagcgcactagtgctgcagtgtcgtgaactgctggtgaaaaacaccgatctgccgtttattggcgatatcagcgatgtgaaaaccgatatcttcctgcgcaaagatatcaacgaagaaaccgaagtgatctactacccggataacgtgagcgttgatcaggtgatcctgagcaaaaacaccagcgaacatggtcagctggatctgctgtatccgagcattgatagcgaaagcgaaattctgccgggcgaaaaccaggtgttttacgataaccgtacccagaacgtggattacctgaacagctattactacctggaaagccagaaactgagcgataacgtggaagattttacctttacccgcagcattgaagaagcgctggataacagcgcgaaagtttacacctattttccgaccctggcgaacaaagttaatgcgggtgttcagggcggtctgtttctgatgtgggcgaacgatgtggtggaagatttcaccaccaacatcctgcgtaaagataccctggataaaatcagcgatgttagcgcgattattccgtatattggtccggcgctgaacattagcaatagcgtgcgtcgtggcaattttaccgaagcgtttgcggttaccggtgtgaccattctgctggaagcgtttccggaatttaccattccggcgctgggtgcgtttgtgatctatagcaaagtgcaggaacgcaacgaaatcatcaaaaccatcgataactgcctggaacagcgtattaaacgctggaaagatagctatgaatggatgatgggcacctggctgagccgtattatcacccagttcaacaacatcagctaccagatgtacgatagcctgaactatcaggcgggtgcgattaaagcgaaaatcgatctggaatacaaaaaatacagcggcagcgataaagaaaacatcaaaagccaggttgaaaacctgaaaaacagcctggatgtgaaaattagcgaagcgatgaataacatcaacaaattcatccgcgaatgcagcgtgacctacctgttcaaaaacatgctgccgaaagtgatcgatgaactgaacgaatttgatcgcaacaccaaagcgaaactgatcaacctgatcgatagccacaacattattctggtgggcgaagtggataaactgaaagcgaaagttaacaacagcttccagaacaccatcccgtttaacatcttcagctataccaacaacagcctgctgaaagatatcatcaacgaatacttcaatctagactag

SEQ ID NO: 67 - protein, 913 aa, Artificial Sequence
  Synthetic
GSEFMPITINNFNYSDPVDNKNILYLDTHLNTLANEPEKAFRITGNIWVIPDRFSRNSNPNLNKPPRVTSPKSGYYDPNYLSTDSDKDTFLKEIIKLFKRINSREIGEELIYRLSTDIPFPGNNNTPINTFDFDVDFNSVDVKTRQGNNWVKTGSINPSVIITGPRENIIDPETSTFKLTNNTFAAQEGFGALSIISISPRFMLTYSNATNDVGEGRFSKSEFCMDPILILMHELNHAMHNLYGIAIPNDQTISSVTSNIFYSQYNVKLEYAEIYAFGGPTIDLIPKSARKYFEEKALDYYRSIAKRLNSITTANPSSFNKYIGEYKQKLIRKYRFVVESSGEVTVNRNKFVELYNELTQIFTEFNYAKIYNVQNRKIYLSNVYTPVTANILDDNVYDIQNGFNIPKSNLNVLFMGQNLSRNPALRKVNPENMLYLFTKFCVDGIITSKTKSLIEGRFGGFTGARKSARKRKNQALAGGGGSGGGGSGGGGSALVLQCRELLVKNTDLPFIGDISDVKTDIFLRKDINEETEVIYYPDNVSVDQVILSKNTSEHGQLDLLYPSIDSESEILPGENQVFYDNRTQNVDYLNSYYYLESQKLSDNVEDFTFTRSIEEALDNSAKVYTYFPTLANKVNAGVQGGLFLMWANDVVEDFTTNILRKDTLDKISDVSAIIPYIGPALNISNSVRRGNFTEAFAVTGVTILLEAFPEFTIPALGAFVIYSKVQERNEIIKTIDNCLEQRIKRWKDSYEWMMGTWLSRIITQFNNISYQMYDSLNYQAGAIKAKIDLEYKKYSGSDKENIKSQVENLKNSLDVKISEAMNNINKFIRECSVTYLFKNMLPKVIDELNEFDRNTKAKLINLIDSHNIILVGEVDKLKAKVNNSFQNTIPFNIFSYTNNSLLKDIINEYFNLD

SEQ ID NO: 68 - DNA, 2673 bp, Artificial Sequence
  Synthetic
ggatccatggagttcgttaacaaacagttcaactataaagacccagttaacggtgttgacattgcttacatcaaaatcccgaacgctggccagatgcagccggtaaaggcattcaaaatccacaacaaaatctgggttatcccggaacgtgatacctttactaacccggaagaaggtgacctgaacccgccaccggaagcgaaacaggtgccggtatcttactatgactccacctacctgtctaccgataacgaaaaggacaactacctgaaaggtgttactaaactgttcgagcgtatttactccaccgacctgggccgtatgctgctgactagcatcgttcgcggtatcccgttctggggcggttctaccatcgataccgaactgaaagtaatcgacactaactgcatcaacgttattcagccggacggttcctatcgttccgaagaactgaacctggtgatcatcggcccgtctgctgatatcatccagttcgagtgtaagagctttggtcacgaagttctgaacctcacccgtaacggctacggttccactcagtacatccgtttctctccggacttcaccttcggttttgaagaatccctggaagtagacacgaacccactgctgggcgctggtaaattcgcaactgatcctgcggttaccctggctcacgaactgattcatgcaggccaccgcctgtacggtatcgccatcaatccgaaccgtgtcttcaaagttaacaccaacgcgtattacgagatgtccggtctggaagttagcttcgaagaactgcgtacttttggcggtcacgacgctaaattcatcgactctctgcaagaaaacgagttccgtctgtactactataacaagttcaaagatatcgcatccaccctgaacaaagcgaaatccatcgtgggtaccactgcttctctccagtacatgaagaacgtttttaaagaaaaatacctgctcagcgaagacacctccggcaaattctctgtagacaagttgaaattcgataaactttacaaaatgctgactgaaatttacaccgaagacaacttcgttaagttctttaaagttctgaaccgcaaaacctatctgaacttcgacaaggcagtattcaaaatcaacatcgtgccgaaagttaactacactatctacgatggtttcaacctgcgtaacaccaacctggctgctaattttaacggccagaacacggaaatcaacaacatgaacttcacaaaactgaaaaacttcactggtctgttcgagttttacaagctgctgtgcgtcgacggcatcattacctccaaaactaaatctctgatagaaggtagatacggtggtttcctggcgctagcgggcggtggcggtagcggcggtggcggtagcggcggtggcggtagcgcactagtgctgcagtgtatcaaggttaacaactgggatttattcttcagcccgagtgaagacaacttcaccaacgacctgaacaaaggtgaagaaatcacctcagatactaacatcgaagcagccgaagaaaacatctcgctggacctgatccagcagtactacctgacctttaatttcgacaacgagccggaaaacatttctatcgaaaacctgagctctgatatcatcggccagctggaactgatgccgaacatcgaacgtttcccaaacggtaaaaagtacgagctggacaaatataccatgttccactacctgcgcgcgcaggaatttgaacacggcaaatcccgtatcgcactgactaactccgttaacgaagctctgctcaacccgtcccgtgtatacaccttcttctctagcgactacgtgaaaaaggtcaacaaagcgactgaagctgcaatgttcttgggttgggttgaacagcttgtttatgattttaccgacgagacgtccgaagtatctactaccgacaaaattgcggatatcactatcatcatcccgtacatcggtccggctctgaacattggcaacatgctgtacaaagacgacttcgttggcgcactgatcttctccggtgcggtgatcctgctggagttcatcccggaaatcgccatcccggtactgggcacctttgctctggtttcttacattgcaaacaaggttctgactgtacaaaccatcgacaacgcgctgagcaaacgtaacgaaaaatgggatgaagtttacaaatatatcgtgaccaactggctggctaaggttaatactcagatcgacctcatccgcaaaaaaatgaaagaagcactggaaaaccaggcggaagctaccaaggcaatcattaactaccagtacaaccagtacaccgaggaagaaaaaaacaacatcaacttcaacatcgacgatctgtcctctaaactgaacgaatccatcaacaaagctatgatcaacatcaacaagttcctgaaccagtgctctgtaagctatctgatgaactccatgatcccgtacggtgttaaacgtctggaggacttcgatgcgtctctgaaagacgccctgctgaaatacatttacgacaaccgtggcactctgatcggtcaggttgatcgtctgaaggacaaagtgaacaataccttatcgaccgacatcccttttcagctcagtaaatatgtcgataaccaacgccttttgtccactctagactag

SEQ ID NO: 69 - protein, 890 aa, Artificial Sequence
  Synthetic
GSMEFVNKQFNYKDPVNGVDIAYIKIPNAGQMQPVKAFKIHNKIWVIPERDTFTNPEEGDLNPPPEAKQVPVSYYDSTYLSTDNEKDNYLKGVTKLFERIYSTDLGRMLLTSIVRGIPFWGGSTIDTELKVIDTNCINVIQPDGSYRSEELNLVIIGPSADIIQFECKSFGHEVLNLTRNGYGSTQYIRFSPDFTFGFEESLEVDTNPLLGAGKFATDPAVTLAHELIHAGHRLYGIAINPNRVFKVNTNAYYEMSGLEVSFEELRTFGGHDAKFIDSLQENEFRLYYYNKFKDIASTLNKAKSIVGTTASLQYMKNVFKEKYLLSEDTSGKFSVDKLKFDKLYKMLTEIYTEDNFVKFFKVLNRKTYLNFDKAVFKINIVPKVNYTIYDGFNLRNTNLAANFNGQNTEINNMNFTKLKNFTGLFEFYKLLCVDGIITSKTKSLIEGRYGGFLALAGGGGSGGGGSGGGGSALVLQCIKVNNWDLFFSPSEDNFTNDLNKGEEITSDTNIEAAEENISLDLIQQYYLTFNFDNEPENISIENLSSDIIGQLELMPNIERFPNGKKYELDKYTMFHYLRAQEFEHGKSRIALTNSVNEALLNPSRVYTFFSSDYVKKVNKATEAAMFLGWVEQLVYDFTDETSEVSTTDKIADITIIIPYIGPALNIGNMLYKDDFVGALIFSGAVILLEFIPEIAIPVLGTFALVSYIANKVLTVQTIDNALSKRNEKWDEVYKYIVTNWLAKVNTQIDLIRKKMKEALENQAEATKAIINYQYNQYTEEEKNNINFNIDDLSSKLNESINKAMININKFLNQCSVSYLMNSMIPYGVKRLEDFDASLKDALLKYIYDNRGTLIGQVDRLKDKVNNTLSTDIPFQLSKYVDNQRLLSTLD

SEQ ID NO: 70 - DNA, 2709 bp, Artificial Sequence
  Synthetic
ggatccatggagttcgttaacaaacagttcaactataaagacccagttaacggtgttgacattgcttacatcaaaatcccgaacgctggccagatgcagccggtaaaggcattcaaaatccacaacaaaatctgggttatcccggaacgtgatacctttactaacccggaagaaggtgacctgaacccgccaccggaagcgaaacaggtgccggtatcttactatgactccacctacctgtctaccgataacgaaaaggacaactacctgaaaggtgttactaaactgttcgagcgtatttactccaccgacctgggccgtatgctgctgactagcatcgttcgcggtatcccgttctggggcggttctaccatcgataccgaactgaaagtaatcgacactaactgcatcaacgttattcagccggacggttcctatcgttccgaagaactgaacctggtgatcatcggcccgtctgctgatatcatccagttcgagtgtaagagctttggtcacgaagttctgaacctcacccgtaacggctacggttccactcagtacatccgtttctctccggacttcaccttcggttttgaagaatccctggaagtagacacgaacccactgctgggcgctggtaaattcgcaactgatcctgcggttaccctggctcacgaactgattcatgcaggccaccgcctgtacggtatcgccatcaatccgaaccgtgtcttcaaagttaacaccaacgcgtattacgagatgtccggtctggaagttagcttcgaagaactgcgtacttttggcggtcacgacgctaaattcatcgactctctgcaagaaaacgagttccgtctgtactactataacaagttcaaagatatcgcatccaccctgaacaaagcgaaatccatcgtgggtaccactgcttctctccagtacatgaagaacgtttttaaagaaaaatacctgctcagcgaagacacctccggcaaattctctgtagacaagttgaaattcgataaactttacaaaatgctgactgaaatttacaccgaagacaacttcgttaagttctttaaagttctgaaccgcaaaacctatctgaacttcgacaaggcagtattcaaaatcaacatcgtgccgaaagttaactacactatctacgatggtttcaacctgcgtaacaccaacctggctgctaattttaacggccagaacacggaaatcaacaacatgaacttcacaaaactgaaaaacttcactggtctgttcgagttttacaagctgctgtgcgtcgacggcatcattacctccaaaactaaatctctgatagaaggtagatatggcggtttcacgggcgcacgcaaatcagcgcgtaaattagctaaccaggcgctagcgggcggtggcggtagcggcggtggcggtagcggcggtggcggtagcgcactagtgctgcagtgtatcaaggttaacaactgggatttattcttcagcccgagtgaagacaacttcaccaacgacctgaacaaaggtgaagaaatcacctcagatactaacatcgaagcagccgaagaaaacatctcgctggacctgatccagcagtactacctgacctttaatttcgacaacgagccggaaaacatttctatcgaaaacctgagctctgatatcatcggccagctggaactgatgccgaacatcgaacgtttcccaaacggtaaaaagtacgagctggacaaatataccatgttccactacctgcgcgcgcaggaatttgaacacggcaaatcccgtatcgcactgactaactccgttaacgaagctctgctcaacccgtcccgtgtatacaccttcttctctagcgactacgtgaaaaaggtcaacaaagcgactgaagctgcaatgttcttgggttgggttgaacagcttgtttatgattttaccgacgagacgtccgaagtatctactaccgacaaaattgcggatatcactatcatcatcccgtacatcggtccggctctgaacattggcaacatgctgtacaaagacgacttcgttggcgcactgatcttctccggtgcggtgatcctgctggagttcatcccggaaatcgccatcccggtactgggcacctttgctctggtttcttacattgcaaacaaggttctgactgtacaaaccatcgacaacgcgctgagcaaacgtaacgaaaaatgggatgaagtttacaaatatatcgtgaccaactggctggctaaggttaatactcagatcgacctcatccgcaaaaaaatgaaagaagcactggaaaaccaggcggaagctaccaaggcaatcattaactaccagtacaaccagtacaccgaggaagaaaaaaacaacatcaacttcaacatcgacgatctgtcctctaaactgaacgaatccatcaacaaagctatgatcaacatcaacaagttcctgaaccagtgctctgtaagctatctgatgaactccatgatcccgtacggtgttaaacgtctggaggacttcgatgcgtctctgaaagacgccctgctgaaatacatttacgacaaccgtggcactctgatcggtcaggttgatcgtctgaaggacaaagtgaacaataccttatcgaccgacatcccttttcagctcagtaaatatgtcgataaccaacgccttttgtccactctagactag

SEQ ID NO: 71 - protein, 902 aa, Artificial Sequence
  Synthetic
GSMEFVNKQFNYKDPVNGVDIAYIKIPNAGQMQPVKAFKIHNKIWVIPERDTFTNPEEGDLNPPPEAKQVPVSYYDSTYLSTDNEKDNYLKGVTKLFERIYSTDLGRMLLTSIVRGIPFWGGSTIDTELKVIDTNCINVIQPDGSYRSEELNLVIIGPSADIIQFECKSFGHEVLNLTRNGYGSTQYIRFSPDFTFGFEESLEVDTNPLLGAGKFATDPAVTLAHELIHAGHRLYGIAINPNRVFKVNTNAYYEMSGLEVSFEELRTFGGHDAKFIDSLQENEFRLYYYNKFKDIASTLNKAKSIVGTTASLQYMKNVFKEKYLLSEDTSGKFSVDKLKFDKLYKMLTEIYTEDNFVKFFKVLNRKTYLNFDKAVFKINIVPKVNYTIYDGFNLRNTNLAANFNGQNTEINNMNFTKLKNFTGLFEFYKLLCVDGIITSKTKSLIEGRYGGFTGARKSARKLANQALAGGGGSGGGGSGGGGSALVLQCIKVNNWDLFFSPSEDNFTNDLNKGEEITSDTNIEAAEENISLDLIQQYYLTFNFDNEPENISIENLSSDIIGQLELMPNIERFPNGKKYELDKYTMFHYLRAQEFEHGKSRIALTNSVNEALLNPSRVYTFFSSDYVKKVNKATEAAMFLGWVEQLVYDFTDETSEVSTTDKIADITIIIPYIGPALNIGNMLYKDDFVGALIFSGAVILLEFIPEIAIPVLGTFALVSYIANKVLTVQTIDNALSKRNEKWDEVYKYIVTNWLAKVNTQIDLIRKKMKEALENQAEATKAIINYQYNQYTEEEKNNINFNIDDLSSKLNESINKAMININKFLNQCSVSYLMNSMIPYGVKRLEDFDASLKDALLKYIYDNRGTLIGQVDRLKDKVNNTLSTDIPFQLSKYVDNQRLLSTLD

SEQ ID NO: 72 - DNA, 2709 bp, Artificial Sequence
  Synthetic
ggatccatggagttcgttaacaaacagttcaactataaagacccagttaacggtgttgacattgcttacatcaaaatcccgaacgctggccagatgcagccggtaaaggcattcaaaatccacaacaaaatctgggttatcccggaacgtgatacctttactaacccggaagaaggtgacctgaacccgccaccggaagcgaaacaggtgccggtatcttactatgactccacctacctgtctaccgataacgaaaaggacaactacctgaaaggtgttactaaactgttcgagcgtatttactccaccgacctgggccgtatgctgctgactagcatcgttcgcggtatcccgttctggggcggttctaccatcgataccgaactgaaagtaatcgacactaactgcatcaacgttattcagccggacggttcctatcgttccgaagaactgaacctggtgatcatcggcccgtctgctgatatcatccagttcgagtgtaagagctttggtcacgaagttctgaacctcacccgtaacggctacggttccactcagtacatccgtttctctccggacttcaccttcggttttgaagaatccctggaagtagacacgaacccactgctgggcgctggtaaattcgcaactgatcctgcggttaccctggctcacgaactgattcatgcaggccaccgcctgtacggtatcgccatcaatccgaaccgtgtcttcaaagttaacaccaacgcgtattacgagatgtccggtctggaagttagcttcgaagaactgcgtacttttggcggtcacgacgctaaattcatcgactctctgcaagaaaacgagttccgtctgtactactataacaagttcaaagatatcgcatccaccctgaacaaagcgaaatccatcgtgggtaccactgcttctctccagtacatgaagaacgtttttaaagaaaaatacctgctcagcgaagacacctccggcaaattctctgtagacaagttgaaattcgataaactttacaaaatgctgactgaaatttacaccgaagacaacttcgttaagttctttaaagttctgaaccgcaaaacctatctgaacttcgacaaggcagtattcaaaatcaacatcgtgccgaaagttaactacactatctacgatggtttcaacctgcgtaacaccaacctggctgctaattttaacggccagaacacggaaatcaacaacatgaacttcacaaaactgaaaaacttcactggtctgttcgagttttacaagctgctgtgcgtcgacggcatcattacctccaaaactaaatctctgatagaaggtagatatggcggtttcacgggcgcacgcaaatcagcgcgtaaacgtaagaaccaggcgctagcgggcggtggcggtagcggcggtggcggtagcggcggtggcggtagcgcactagtgctgcagtgtatcaaggttaacaactgggatttattcttcagcccgagtgaagacaacttcaccaacgacctgaacaaaggtgaagaaatcacctcagatactaacatcgaagcagccgaagaaaacatctcgctggacctgatccagcagtactacctgacctttaatttcgacaacgagccggaaaacatttctatcgaaaacctgagctctgatatcatcggccagctggaactgatgccgaacatcgaacgtttcccaaacggtaaaaagtacgagctggacaaatataccatgttccactacctgcgcgcgcaggaatttgaacacggcaaatcccgtatcgcactgactaactccgttaacgaagctctgctcaacccgtcccgtgtatacaccttcttctctagcgactacgtgaaaaaggtcaacaaagcgactgaagctgcaatgttcttgggttgggttgaacagcttgtttatgattttaccgacgagacgtccgaagtatctactaccgacaaaattgcggatatcactatcatcatcccgtacatcggtccggctctgaacattggcaacatgctgtacaaagacgacttcgttggcgcactgatcttctccggtgcggtgatcctgctggagttcatcccggaaatcgccatcccggtactgggcacctttgctctggtttcttacattgcaaacaaggttctgactgtacaaaccatcgacaacgcgctgagcaaacgtaacgaaaaatgggatgaagtttacaaatatatcgtgaccaactggctggctaaggttaatactcagatcgacctcatccgcaaaaaaatgaaagaagcactggaaaaccaggcggaagctaccaaggcaatcattaactaccagtacaaccagtacaccgaggaagaaaaaaacaacatcaacttcaacatcgacgatctgtcctctaaactgaacgaatccatcaacaaagctatgatcaacatcaacaagttcctgaaccagtgctctgtaagctatctgatgaactccatgatcccgtacggtgttaaacgtctggaggacttcgatgcgtctctgaaagacgccctgctgaaatacatttacgacaaccgtggcactctgatcggtcaggttgatcgtctgaaggacaaagtgaacaataccttatcgaccgacatcccttttcagctcagtaaatatgtcgataaccaacgccttttgtccactctagactag

SEQ ID NO: 73 - protein, 902 aa, Artificial Sequence
  Synthetic
GSMEFVNKQFNYKDPVNGVDIAYIKIPNAGQMQPVKAFKIHNKIWVIPERDTFTNPEEGDLNPPPEAKQVPVSYYDSTYLSTDNEKDNYLKGVTKLFERIYSTDLGRMLLTSIVRGIPFWGGSTIDTELKVIDTNCINVIQPDGSYRSEELNLVIIGPSADIIQFECKSFGHEVLNLTRNGYGSTQYIRFSPDFTFGFEESLEVDTNPLLGAGKFATDPAVTLAHELIHAGHRLYGIAINPNRVFKVNTNAYYEMSGLEVSFEELRTFGGHDAKFIDSLQENEFRLYYYNKFKDIASTLNKAKSIVGTTASLQYMKNVFKEKYLLSEDTSGKFSVDKLKFDKLYKMLTEIYTEDNFVKFFKVLNRKTYLNFDKAVFKINIVPKVNYTIYDGFNLRNTNLAANFNGQNTEINNMNFTKLKNFTGLFEFYKLLCVDGIITSKTKSLIEGRYGGFTGARKSARKRKNQALAGGGGSGGGGSGGGGSALVLQCIKVNNWDLFFSPSEDNFTNDLNKGEEITSDTNIEAAEENISLDLIQQYYLTFNFDNEPENISIENLSSDIIGQLELMPNIERFPNGKKYELDKYTMFHYLRAQEFEHGKSRIALTNSVNEALLNPSRVYTFFSSDYVKKVNKATEAAMFLGWVEQLVYDFTDETSEVSTTDKIADITIIIPYIGPALNIGNMLYKDDFVGALIFSGAVILLEFIPEIAIPVLGTFALVSYIANKVLTVQTIDNALSKRNEKWDEVYKYIVTNWLAKVNTQIDLIRKKMKEALENQAEATKAIINYQYNQYTEEEKNNINFNIDDLSSKLNESINKAMININKFLNQCSVSYLMNSMIPYGVKRLEDFDASLKDALLKYIYDNRGTLIGQVDRLKDKVNNTLSTDIPFQLSKYVDNQRLLSTLD

SEQ ID NO: 74 - DNA, 2889 bp, Artificial Sequence
  Synthetic
ggatccttggtacgagatgacgttgactatcaaattttccgcgactttgcggaaaataaaggtaagtttttcgtcggcgccacagacctgtccgtcaaaaataagagaggccagaacatcggtaacgcactgagcaacgtccctatgattgattttagtgtagcggacgttaataaacggattgcaaccgtcgttgatccgcagtatgctgtcagcgtcaaacatgctaaagcggaagttcatacgttctattacgggcaatataacggccataacgatgtggctgataaagaaaatgaatatcgcgtggtcgagcagaacaattacgaaccgcacaaagcgtggggcgcgagtaatttaggccgcctggaggactataacatggcccgtttcaataaattcgtgaccgaggtagcaccgatcgcccccacagatgctggtgggggcctggatacctacaaagataaaaaccgcttctctagcttcgtgcgcattggcgccggtcgtcagctcgtgtacgagaagggtgtctatcaccaggaaggtaatgaaaaggggtacgacctccgtgatttgtcccaggcgtatcgctacgctattgccggaaccccgtataaagatattaatatcgatcaaaccatgaataccgaaggcctaattggtttcgggaatcataataagcaatatagcgcagaagagctaaagcaggccctcagccaagatgcgttaaccaattacggagtgttaggcgatagcggcagtccgctgtttgccttcgataaacagaaaaatcaatgggtgtttctgggcacttatgattattgggccggatatggtaaaaagagctggcaggaatggaatatttataaaaaggaattcgcagacaaaatcaagcagcatgacaacgcaggtacggtgaaggggaacggcgaacatcactggaagacgaccggcacgaatagtcatatcggatcgacggccgttcgcctggcgaacaatgagggcgatgcaaacaatgggcaaaacgtgacctttgaggacaacggtaccctggtccttaaccagaacataaatcagggcgcgggaggcttgttctttaaaggcgactatactgttaagggagcaaacaatgacatcacctggttaggggccggtattgacgttgcggatggaaaaaaggtggtttggcaggttaaaaaccctaacggggaccggctggcaaaaatcggcaaagggacattggaaattaatggtaccggtgtgaatcagggtcagctgaaagtgggagatgggaccgtgattctgaaccagaaagcagacgctgacaaaaaggtgcaagcctttagccaagtaggaattgttagtggtcgtggcacactcgtcttgaactcaagcaaccaaataaatccggataacctgtactttggatttcgtggcggacgcctggatgctaacgggaatgatctgacctttgaacatatccgtaacgttgacgagggtgcgcgcatagttaatcataatactgaccatgcatcaactatcaccttgaccgggaaaagtctgattacaaacccaaactctctgtcagtacattccatccagaatgattatgatgaagacgattactcatactattaccggccgcgtagaccaattccacaaggtaaagatctttattacaaaaattaccgttattacgcattaaaatccggagggcggctgaatgcacctatgccggaaaatggcgtggccgaaaacaatgactggatttttatgggttatactcaagaagaggctcgcaaaaatgcaatgaaccataaaaataaccgaaggatcggtgatttcggcggatttttcgatgaggaaaatggtaaaggtcacaatggtgcgctgaatctaaattttaacggcaaaagtgcccagaaacgtttccttctgactggtggcgctaatctgaatggtaaaatcagtgtgacgcagggtaacgtgctgctttctggccggccaactccgcatgcacgtgattttgtaaataaatcgagcgctcgtaaagatgcgcatttttctaaaaataacgaggtcgtgtttgaagatgactggataaatcgcacctttaaagcggcagaaatcgcggttaatcagagtgcgagcttttcatcgggtaggaatgtatctgatattacagcaaacattacagccactgataatgcgaaggtcaacctgggttataaaaacggtgatgaagtttgtgttcgatcggattacacgggctatgttacctgcaacactggcaatctgtctgataaagcgcttaactcttttgacgccacgcgcattaacgggaatgtgaacctgaaccaaaacgctgccttggtacttggtaaggccgcgttgtggggtaaaattcagggccagggcaactcccgtgtgtctctgaaccagcactcgaagtggcacctgacgggggactcgcaggtgcacaacttgtccctggccgatagccatattcaccttaacaatgcgtccgatgcccagtcagctaataaatatcatacgatcaaaatcaatcacctctctggcaacggtcactttcactacttaacggatttagcaaaaaacttaggggataaagtcctggtaaaagaatcagcgagcggacattatcagttacatgtacagaacaaaacaggcgagccaaatcaggaaggccttgacttatttgatgcttcatcggtacaagatcgttccagactgttcgtttcactcgcgaatcactacgttgatctgggtgcgctgcgctatactataaagacggaaaatggcataacacgcctctataatccctatgccggtaacggccgtccggtgaaacctgctccctgcgtcgac

SEQ ID NO: 75 - DNA, 4296 bp, Artificial Sequence
  Synthetic
ggatccttggtacgagatgacgttgactatcaaattttccgcgactttgcggaaaataaaggtaagtttttcgtcggcgccacagacctgtccgtcaaaaataagagaggccagaacatcggtaacgcactgagcaacgtccctatgattgattttagtgtagcggacgttaataaacggattgcaaccgtcgttgatccgcagtatgctgtcagcgtcaaacatgctaaagcggaagttcatacgttctattacgggcaatataacggccataacgatgtggctgataaagaaaatgaatatcgcgtggtcgagcagaacaattacgaaccgcacaaagcgtggggcgcgagtaatttaggccgcctggaggactataacatggcccgtttcaataaattcgtgaccgaggtagcaccgatcgcccccacagatgctggtgggggcctggatacctacaaagataaaaaccgcttctctagcttcgtgcgcattggcgccggtcgtcagctcgtgtacgagaagggtgtctatcaccaggaaggtaatgaaaaggggtacgacctccgtgatttgtcccaggcgtatcgctacgctattgccggaaccccgtataaagatattaatatcgatcaaaccatgaataccgaaggcctaattggtttcgggaatcataataagcaatatagcgcagaagagctaaagcaggccctcagccaagatgcgttaaccaattacggagtgttaggcgatagcggcagtccgctgtttgccttcgataaacagaaaaatcaatgggtgtttctgggcacttatgattattgggccggatatggtaaaaagagctggcaggaatggaatatttataaaaaggaattcgcagacaaaatcaagcagcatgacaacgcaggtacggtgaaggggaacggcgaacatcactggaagacgaccggcacgaatagtcatatcggatcgacggccgttcgcctggcgaacaatgagggcgatgcaaacaatgggcaaaacgtgacctttgaggacaacggtaccctggtccttaaccagaacataaatcagggcgcgggaggcttgttctttaaaggcgactatactgttaagggagcaaacaatgacatcacctggttaggggccggtattgacgttgcggatggaaaaaaggtggtttggcaggttaaaaaccctaacggggaccggctggcaaaaatcggcaaagggacattggaaattaatggtaccggtgtgaatcagggtcagctgaaagtgggagatgggaccgtgattctgaaccagaaagcagacgctgacaaaaaggtgcaagcctttagccaagtaggaattgttagtggtcgtggcacactcgtcttgaactcaagcaaccaaataaatccggataacctgtactttggatttcgtggcggacgcctggatgctaacgggaatgatctgacctttgaacatatccgtaacgttgacgagggtgcgcgcatagttaatcataatactgaccatgcatcaactatcaccttgaccgggaaaagtctgattacaaacccaaactctctgtcagtacattccatccagaatgattatgatgaagacgattactcatactattaccggccgcgtagaccaattccacaaggtaaagatctttattacaaaaattaccgttattacgcattaaaatccggagggcggctgaatgcacctatgccggaaaatggcgtggccgaaaacaatgactggatttttatgggttatactcaagaagaggctcgcaaaaatgcaatgaaccataaaaataaccgaaggatcggtgatttcggcggatttttcgatgaggaaaatggtaaaggtcacaatggtgcgctgaatctaaattttaacggcaaaagtgcccagaaacgtttccttctgactggtggcgctaatctgaatggtaaaatcagtgtgacgcagggtaacgtgctgctttctggccggccaactccgcatgcacgtgattttgtaaataaatcgagcgctcgtaaagatgcgcatttttctaaaaataacgaggtcgtgtttgaagatgactggataaatcgcacctttaaagcggcagaaatcgcggttaatcagagtgcgagcttttcatcgggtaggaatgtatctgatattacagcaaacattacagccactgataatgcgaaggtcaacctgggttataaaaacggtgatgaagtttgtgttcgatcggattacacgggctatgttacctgcaacactggcaatctgtctgataaagcgcttaactcttttgacgccacgcgcattaacgggaatgtgaacctgaaccaaaacgctgccttggtacttggtaaggccgcgttgtggggtaaaattcagggccagggcaactcccgtgtgtctctgaaccagcactcgaagtggcacctgacgggggactcgcaggtgcacaacttgtccctggccgatagccatattcaccttaacaatgcgtccgatgcccagtcagctaataaatatcatacgatcaaaatcaatcacctctctggcaacggtcactttcactacttaacggatttagcaaaaaacttaggggataaagtcctggtaaaagaatcagcgagcggacattatcagttacatgtacagaacaaaacaggcgagccaaatcaggaaggccttgacttatttgatgcttcatcggtacaagatcgttccagactgttcgtttcactcgcgaatcactacgttgatctgggtgcgctgcgctatactataaagacggaaaatggcataacacgcctctataatccctatgccggtaacggccgtccggtgaaacctgctccctgcgtcgacggcatcattacctccaaaactaaatctctgatagaaggtagatttggcggtttcacgggcgcacgcaaatcagcgcgtaaacgtaagaaccaggcgctagcgggcggtggcggtagcggcggtggcggtagcggcggtggcggtagcgcactagtgctgcagtgtatcaaggttaacaactgggatttattcttcagcccgagtgaagacaacttcaccaacgacctgaacaaaggtgaagaaatcacctcagatactaacatcgaagcagccgaagaaaacatctcgctggacctgatccagcagtactacctgacctttaatttcgacaacgagccggaaaacatttctatcgaaaacctgagctctgatatcatcggccagctggaactgatgccgaacatcgaacgtttcccaaacggtaaaaagtacgagctggacaaatataccatgttccactacctgcgcgcgcaggaatttgaacacggcaaatcccgtatcgcactgactaactccgttaacgaagctctgctcaacccgtcccgtgtatacaccttcttctctagcgactacgtgaaaaaggtcaacaaagcgactgaagctgcaatgttcttgggttgggttgaacagcttgtttatgattttaccgacgagacgtccgaagtatctactaccgacaaaattgcggatatcactatcatcatcccgtacatcggtccggctctgaacattggcaacatgctgtacaaagacgacttcgttggcgcactgatcttctccggtgcggtgatcctgctggagttcatcccggaaatcgccatcccggtactgggcacctttgctctggtttcttacattgcaaacaaggttctgactgtacaaaccatcgacaacgcgctgagcaaacgtaacgaaaaatgggatgaagtttacaaatatatcgtgaccaactggctggctaaggttaatactcagatcgacctcatccgcaaaaaaatgaaagaagcactggaaaaccaggcggaagctaccaaggcaatcattaactaccagtacaaccagtacaccgaggaagaaaaaaacaacatcaacttcaacatcgacgatctgtcctctaaactgaacgaatccatcaacaaagctatgatcaacatcaacaagttcctgaaccagtgctctgtaagctatctgatgaactccatgatcccgtacggtgttaaacgtctggaggacttcgatgcgtctctgaaagacgccctgctgaaatacatttacgacaaccgtggcactctgatcggtcaggttgatcgtctgaaggacaaagtgaacaataccttatcgaccgacatcccttttcagctcagtaaatatgtcgataaccaacgccttttgtccactctagactag

SEQ ID NO: 76 - protein, 1431 aa, Artificial Sequence
  Synthetic
GSLVRDDVDYQIFRDFAENKGKFFVGATDLSVKNKRGQNIGNALSNVPMIDFSVADVNKRIATVVDPQYAVSVKHAKAEVHTFYYGQYNGHNDVADKENEYRVVEQNNYEPHKAWGASNLGRLEDYNMARFNKFVTEVAPIAPTDAGGGLDTYKDKNRFSSFVRIGAGRQLVYEKGVYHQEGNEKGYDLRDLSQAYRYAIAGTPYKDINIDQTMNTEGLIGFGNHNKQYSAEELKQALSQDALTNYGVLGDSGSPLFAFDKQKNQWVFLGTYDYWAGYGKKSWQEWNIYKKEFADKIKQHDNAGTVKGNGEHHWKTTGTNSHIGSTAVRLANNEGDANNGQNVTFEDNGTLVLNQNINQGAGGLFFKGDYTVKGANNDITWLGAGIDVADGKKVVWQVKNPNGDRLAKIGKGTLEINGTGVNQGQLKVGDGTVILNQKADADKKVQAFSQVGIVSGRGTLVLNSSNQINPDNLYFGFRGGRLDANGNDLTFEHIRNVDEGARIVNHNTDHASTITLTGKSLITNPNSLSVHSIQNDYDEDDYSYYYRPRRPIPQGKDLYYKNYRYYALKSGGRLNAPMPENGVAENNDWIFMGYTQEEARKNAMNHKNNRRIGDFGGFFDEENGKGHNGALNLNFNGKSAQKRFLLTGGANLNGKISVTQGNVLLSGRPTPHARDFVNKSSARKDAHFSKNNEVVFEDDWINRTFKAAEIAVNQSASFSSGRNVSDITANITATDNAKVNLGYKNGDEVCVRSDYTGYVTCNTGNLSDKALNSFDATRINGNVNLNQNAALVLGKAALWGKIQGQGNSRVSLNQHSKWHLTGDSQVHNLSLADSHIHLNNASDAQSANKYHTIKINHLSGNGHFHYLTDLAKNLGDKVLVKESASGHYQLHVQNKTGEPNQEGLDLFDASSVQDRSRLFVSLANHYVDLGALRYTIKTENGITRLYNPYAGNGRPVKPAPCVDGIITSKTKSLIEGRFGGFTGARKSARKRKNQALAGGGGSGGGGSGGGGSALVLQCIKVNNWDLFFSPSEDNFTNDLNKGEEITSDTNIEAAEENISLDLIQQYYLTFNFDNEPENISIENLSSDIIGQLELMPNIERFPNGKKYELDKYTMFHYLRAQEFEHGKSRIALTNSVNEALLNPSRVYTFFSSDYVKKVNKATEAAMFLGWVEQLVYDFTDETSEVSTTDKIADITIIIPYIGPALNIGNMLYKDDFVGALIFSGAVILLEFIPEIAIPVLGTFALVSYIANKVLTVQTIDNALSKRNEKWDEVYKYIVTNWLAKVNTQIDLIRKKMKEALENQAEATKAIINYQYNQYTEEEKNNINFNIDDLSSKLNESINKAMININKFLNQCSVSYLMNSMIPYGVKRLEDFDASLKDALLKYIYDNRGTLIGQVDRLKDKVNNTLSTDIPFQLSKYVDNQRLLSTLD

SEQ ID NO: 77 - DNA, 1357 bp, Artificial Sequence
  Synthetic
gctagcgggcggtggcggtagcggcggtggcggtagcggcggtggcggtagcgcactagtgctgcagtgtatcaaggttaacaactgggatttattcttcagcccgagtgaagacaacttcaccaacgacctgaacaaaggtgaagaaatcacctcagatactaacatcgaagcagccgaagaaaacatctcgctggacctgatccagcagtactacctgacctttaatttcgacaacgagccggaaaacatttctatcgaaaacctgagctctgatatcatcggccagctggaactgatgccgaacatcgaacgtttcccaaacggtaaaaagtacgagctggacaaatataccatgttccactacctgcgcgcgcaggaatttgaacacggcaaatcccgtatcgcactgactaactccgttaacgaagctctgctcaacccgtcccgtgtatacaccttcttctctagcgactacgtgaaaaaggtcaacaaagcgactgaagctgcaatgttcttgggttgggttgaacagcttgtttatgattttaccgacgagacgtccgaagtatctactaccgacaaaattgcggatatcactatcatcatcccgtacatcggtccggctctgaacattggcaacatgctgtacaaagacgacttcgttggcgcactgatcttctccggtgcggtgatcctgctggagttcatcccggaaatcgccatcccggtactgggcacctttgctctggtttcttacattgcaaacaaggttctgactgtacaaaccatcgacaacgcgctgagcaaacgtaacgaaaaatgggatgaagtttacaaatatatcgtgaccaactggctggctaaggttaatactcagatcgacctcatccgcaaaaaaatgaaagaagcactggaaaaccaggcggaagctaccaaggcaatcattaactaccagtacaaccagtacaccgaggaagaaaaaaacaacatcaacttcaacatcgacgatctgtcctctaaactgaacgaatccatcaacaaagctatgatcaacatcaacaagttcctgaaccagtgctctgtaagctatctgatgaactccatgatcccgtacggtgttaaacgtctggaggacttcgatgcgtctctgaaagacgccctgctgaaatacatttacgacaaccgtggcactctgatcggtcaggttgatcgtctgaaggacaaagtgaacaataccttatcgaccgacatcccttttcagctcagtaaatatgtcgataaccaacgccttttgtccactctagaaatagaaggtagaagtgggcaccatcaccatcaccattaatgaaagctt

SEQ ID NO: 78 - DNA, 2745 bp, Artificial Sequence
  Synthetic
ggatccatggagttcgttaacaaacagttcaactataaagacccagttaacggtgttgacattgcttacatcaaaatcccgaacgctggccagatgcagccggtaaaggcattcaaaatccacaacaaaatctgggttatcccggaacgtgatacctttactaacccggaagaaggtgacctgaacccgccaccggaagcgaaacaggtgccggtatcttactatgactccacctacctgtctaccgataacgaaaaggacaactacctgaaaggtgttactaaactgttcgagcgtatttactccaccgacctgggccgtatgctgctgactagcatcgttcgcggtatcccgttctggggcggttctaccatcgataccgaactgaaagtaatcgacactaactgcatcaacgttattcagccggacggttcctatcgttccgaagaactgaacctggtgatcatcggcccgtctgctgatatcatccagttcgagtgtaagagctttggtcacgaagttctgaacctcacccgtaacggctacggttccactcagtacatccgtttctctccggacttcaccttcggttttgaagaatccctggaagtagacacgaacccactgctgggcgctggtaaattcgcaactgatcctgcggttaccctggctcacgaactgattcatgcaggccaccgcctgtacggtatcgccatcaatccgaaccgtgtcttcaaagttaacaccaacgcgtattacgagatgtccggtctggaagttagcttcgaagaactgcgtacttttggcggtcacgacgctaaattcatcgactctctgcaagaaaacgagttccgtctgtactactataacaagttcaaagatatcgcatccaccctgaacaaagcgaaatccatcgtgggtaccactgcttctctccagtacatgaagaacgtttttaaagaaaaatacctgctcagcgaagacacctccggcaaattctctgtagacaagttgaaattcgataaactttacaaaatgctgactgaaatttacaccgaagacaacttcgttaagttctttaaagttctgaaccgcaaaacctatctgaacttcgacaaggcagtattcaaaatcaacatcgtgccgaaagttaactacactatctacgatggtttcaacctgcgtaacaccaacctggctgctaattttaacggccagaacacggaaatcaacaacatgaacttcacaaaactgaaaaacttcactggtctgttcgagttttacaagctgctgtgcgtcgacggcatcattacctccaaaactaaatctctgatagaaggtagatttggcggtttcacgggcgcacgcaaatcagcgcgtaaacgtaagaaccaggcgctagcgggcggtggcggtagcggcggtggcggtagcggcggtggcggtagcgcactagtgctgcagtgtatcaaggttaacaactgggatttattcttcagcccgagtgaagacaacttcaccaacgacctgaacaaaggtgaagaaatcacctcagatactaacatcgaagcagccgaagaaaacatctcgctggacctgatccagcagtactacctgacctttaatttcgacaacgagccggaaaacatttctatcgaaaacctgagctctgatatcatcggccagctggaactgatgccgaacatcgaacgtttcccaaacggtaaaaagtacgagctggacaaatataccatgttccactacctgcgcgcgcaggaatttgaacacggcaaatcccgtatcgcactgactaactccgttaacgaagctctgctcaacccgtcccgtgtatacaccttcttctctagcgactacgtgaaaaaggtcaacaaagcgactgaagctgcaatgttcttgggttgggttgaacagcttgtttatgattttaccgacgagacgtccgaagtatctactaccgacaaaattgcggatatcactatcatcatcccgtacatcggtccggctctgaacattggcaacatgctgtacaaagacgacttcgttggcgcactgatcttctccggtgcggtgatcctgctggagttcatcccggaaatcgccatcccggtactgggcacctttgctctggtttcttacattgcaaacaaggttctgactgtacaaaccatcgacaacgcgctgagcaaacgtaacgaaaaatgggatgaagtttacaaatatatcgtgaccaactggctggctaaggttaatactcagatcgacctcatccgcaaaaaaatgaaagaagcactggaaaaccaggcggaagctaccaaggcaatcattaactaccagtacaaccagtacaccgaggaagaaaaaaacaacatcaacttcaacatcgacgatctgtcctctaaactgaacgaatccatcaacaaagctatgatcaacatcaacaagttcctgaaccagtgctctgtaagctatctgatgaactccatgatcccgtacggtgttaaacgtctggaggacttcgatgcgtctctgaaagacgccctgctgaaatacatttacgacaaccgtggcactctgatcggtcaggttgatcgtctgaaggacaaagtgaacaataccttatcgaccgacatcccttttcagctcagtaaatatgtcgataaccaacgccttttgtccactctagaaatagaaggtagaagtgggcaccatcaccatcaccattaa

SEQ ID NO: 79 - protein, 914 aa, Artificial Sequence
  Synthetic
GSMEFVNKQFNYKDPVNGVDIAYIKIPNAGQMQPVKAFKIHNKIWVIPERDTFTNPEEGDLNPPPEAKQVPVSYYDSTYLSTDNEKDNYLKGVTKLFERIYSTDLGRMLLTSIVRGIPFWGGSTIDTELKVIDTNCINVIQPDGSYRSEELNLVIIGPSADIIQFECKSFGHEVLNLTRNGYGSTQYIRFSPDFTFGFEESLEVDTNPLLGAGKFATDPAVTLAHELIHAGHRLYGIAINPNRVFKVNTNAYYEMSGLEVSFEELRTFGGHDAKFIDSLQENEFRLYYYNKFKDIASTLNKAKSIVGTTASLQYMKNVFKEKYLLSEDTSGKFSVDKLKFDKLYKMLTEIYTEDNFVKFFKVLNRKTYLNFDKAVFKINIVPKVNYTIYDGFNLRNTNLAANFNGQNTEINNMNFTKLKNFTGLFEFYKLLCVDGIITSKTKSLIEGRFGGFTGARKSARKRKNQALAGGGGSGGGGSGGGGSALVLQCIKVNNWDLFFSPSEDNFTNDLNKGEEITSDTNIEAAEENISLDLIQQYYLTFNFDNEPENISIENLSSDIIGQLELMPNIERFPNGKKYELDKYTMFHYLRAQEFEHGKSRIALTNSVNEALLNPSRVYTFFSSDYVKKVNKATEAAMFLGWVEQLVYDFTDETSEVSTTDKIADITIIIPYIGPALNIGNMLYKDDFVGALIFSGAVILLEFIPEIAIPVLGTFALVSYIANKVLTVQTIDNALSKRNEKWDEVYKYIVTNWLAKVNTQIDLIRKKMKEALENQAEATKAIINYQYNQYTEEEKNNINFNIDDLSSKLNESINKAMININKFLNQCSVSYLMNSMIPYGVKRLEDFDASLKDALLKYIYDNRGTLIGQVDRLKDKVNNTLSTDIPFQLSKYVDNQRLLSTLEIEGRSGHHHHHH

SEQ ID NO: 80 - DNA, 619 bp, Artificial Sequence
  Synthetic
gctagcgggcggtggcggtagcggcggtggcggtagcggcggtggcggtagcgcactagtgctgcagtgtatcaatctggattgggacgtaatccgtgataagaccaaaacaaaaatcgagtctttgaaagaacacggcccgatcaaaaataagatgtctgaatcacccaataaaactgtttcggaggaaaaagcgaaacagtatttggaagagtttcatcaaaccgcgcttgaacatccggagctcagtgaactgaaaacagtgacgggaacgaatcctgtttttgcaggcgcaaactatgcggcttgggccgtgaatgttgcccaagtaattgatagtgagaccgcagacaacctggaaaagacgaccgcagcgttaagcattttaccggggattggttccgtgatgggtatagcggatggagcggtccaccataacactgaggaaattgtcgcccagtcaatcgctctgagttccctgatggttgcacaggctatcccactcgtgggggaactggttgacataggtttcgccgcctacaacttcgtagaaagcattattaatctttttcaggtggtgcataacagctacaaccgccctctagaatgataaaagctt

SEQ ID NO: 81 - DNA, 1971 bp, Artificial Sequence
  Synthetic
ggatccatggagttcgttaacaaacagttcaactataaagacccagttaacggtgttgacattgcttacatcaaaatcccgaacgctggccagatgcagccggtaaaggcattcaaaatccacaacaaaatctgggttatcccggaacgtgatacctttactaacccggaagaaggtgacctgaacccgccaccggaagcgaaacaggtgccggtatcttactatgactccacctacctgtctaccgataacgaaaaggacaactacctgaaaggtgttactaaactgttcgagcgtatttactccaccgacctgggccgtatgctgctgactagcatcgttcgcggtatcccgttctggggcggttctaccatcgataccgaactgaaagtaatcgacactaactgcatcaacgttattcagccggacggttcctatcgttccgaagaactgaacctggtgatcatcggcccgtctgctgatatcatccagttcgagtgtaagagctttggtcacgaagttctgaacctcacccgtaacggctacggttccactcagtacatccgtttctctccggacttcaccttcggttttgaagaatccctggaagtagacacgaacccactgctgggcgctggtaaattcgcaactgatcctgcggttaccctggctcacgaactgattcatgcaggccaccgcctgtacggtatcgccatcaatccgaaccgtgtcttcaaagttaacaccaacgcgtattacgagatgtccggtctggaagttagcttcgaagaactgcgtacttttggcggtcacgacgctaaattcatcgactctctgcaagaaaacgagttccgtctgtactactataacaagttcaaagatatcgcatccaccctgaacaaagcgaaatccatcgtgggtaccactgcttctctccagtacatgaagaacgtttttaaagaaaaatacctgctcagcgaagacacctccggcaaattctctgtagacaagttgaaattcgataaactttacaaaatgctgactgaaatttacaccgaagacaacttcgttaagttctttaaagttctgaaccgcaaaacctatctgaacttcgacaaggcagtattcaaaatcaacatcgtgccgaaagttaactacactatctacgatggtttcaacctgcgtaacaccaacctggctgctaattttaacggccagaacacggaaatcaacaacatgaacttcacaaaactgaaaaacttcactggtctgttcgagttttacaagctgctgtgcgtcgacggcatcattacctccaaaactaaatctctgatagaaggtagatacggtggtttcctggcgctagcgggcggtggcggtagcggcggtggcggtagcggcggtggcggtagcgcactagtgctgcagtgtatcaatctggattgggacgtaatccgtgataagaccaaaacaaaaatcgagtctttgaaagaacacggcccgatcaaaaataagatgtctgaatcacccaataaaactgtttcggaggaaaaagcgaaacagtatttggaagagtttcatcaaaccgcgcttgaacatccggagctcagtgaactgaaaacagtgacgggaacgaatcctgtttttgcaggcgcaaactatgcggcttgggccgtgaatgttgcccaagtaattgatagtgagaccgcagacaacctggaaaagacgaccgcagcgttaagcattttaccggggattggttccgtgatgggtatagcggatggagcggtccaccataacactgaggaaattgtcgcccagtcaatcgctctgagttccctgatggttgcacaggctatcccactcgtgggggaactggttgacataggtttcgccgcctacaacttcgtagaaagcattattaatctttttcaggtggtgcataacagctacaaccgccctctagaatga

SEQ ID NO: 82 - protein, 656 aa, Artificial Sequence
  Synthetic
GSMEFVNKQFNYKDPVNGVDIAYIKIPNAGQMQPVKAFKIHNKIWVIPERDTFTNPEEGDLNPPPEAKQVPVSYYDSTYLSTDNEKDNYLKGVTKLFERIYSTDLGRMLLTSIVRGIPFWGGSTIDTELKVIDTNCINVIQPDGSYRSEELNLVIIGPSADIIQFECKSFGHEVLNLTRNGYGSTQYIRFSPDFTFGFEESLEVDTNPLLGAGKFATDPAVTLAHELIHAGHRLYGIAINPNRVFKVNTNAYYEMSGLEVSFEELRTFGGHDAKFIDSLQENEFRLYYYNKFKDIASTLNKAKSIVGTTASLQYMKNVFKEKYLLSEDTSGKFSVDKLKFDKLYKMLTEIYTEDNFVKFFKVLNRKTYLNFDKAVFKINIVPKVNYTIYDGFNLRNTNLAANFNGQNTEINNMNFTKLKNFTGLFEFYKLLCVDGIITSKTKSLIEGRYGGFLALAGGGGSGGGGSGGGGSALVLQCINLDWDVIRDKTKTKIESLKEHGPIKNKMSESPNKTVSEEKAKQYLEEFHQTALEHPELSELKTVTGTNPVFAGANYAAWAVNVAQVIDSETADNLEKTTAALSILPGIGSVMGIADGAVHHNTEEIVAQSIALSSLMVAQAIPLVGELVDIGFAAYNFVESIINLFQVVHNSYNRPLE

SEQ ID NO: 83 - DNA, 1329 bp, Artificial Sequence
  Synthetic
ggatccatgcctattactattaacaattttcgttatagcgatcccgtcaacaatgacaccattatcatgatggaaccgccatattgcaaaggactggacatttactataaagccttcaagattactgaccgcatttggattgttccagagcgttacgagttcgggacgaaaccagaagattttaacccgccttcatcgctgatcgaaggagcatcagagtattacgatccgaactatctgcgtacggacagcgataaagaccgcttcttacagaccatggtcaaactttttaaccgtattaagaacaatgtggccggagaagcactcttggataagattatcaacgcgattccatacctgggcaattcttacagcctgctggataaatttgacacaaatagtaattcagtcagctttaacctgttagaacaagatccgagtggcgcaaccacgaagtctgccatgctgacaaatctgatcatttttggtccaggtcctgtactgaataaaaatgaagtacgcggcatcgttctccgcgtggacaataagaactacttcccatgccgtgacggcttcggttcgatcatgcagatggctttctgtccggagtacgttccgacgtttgataatgttattgagaatatcacgagtttaacaatcggtaagtcaaaatattttcaagatccggcccttctccttatgcatgaactgattcacgtgctgcacggcttatatggtatgcaagtgtcctcgcatgaaatcattccgtccaaacaggaaatttatatgcagcatacctacccgatttcagctgaagagttgtttacgtttggtggccaggacgcgaatttgatctccatcgacatcaaaaacgatctgtatgagaaaacattaaatgactataaagcgattgcgaacaaactgtctcaggtgactagctgcaacgatcctaacattgatattgattcctacaaacaaatttatcaacagaaataccagttcgataaagacagcaatggtcagtatatcgtaaacgaagataaatttcagatcctgtataacagcattatgtatggctttaccgaaattgagttggggaagaaatttaacattaaaacccgtctgtcttattttagtatgaaccatgatccggtgaaaatccccaatctgcttgatgataccatttataatgataccgaagggttcaacattgaatctaaggatctgaaatccgaatacaaaggccaaaatatgcgtgttaatactaacgctttccgtaatgttgatggtagtggactcgtctcgaaactgattgggttgtgtgtcgac

SEQ ID NO: 84 - DNA, 2736 bp, Artificial Sequence
  Synthetic
ggatccatgcctattactattaacaattttcgttatagcgatcccgtcaacaatgacaccattatcatgatggaaccgccatattgcaaaggactggacatttactataaagccttcaagattactgaccgcatttggattgttccagagcgttacgagttcgggacgaaaccagaagattttaacccgccttcatcgctgatcgaaggagcatcagagtattacgatccgaactatctgcgtacggacagcgataaagaccgcttcttacagaccatggtcaaactttttaaccgtattaagaacaatgtggccggagaagcactcttggataagattatcaacgcgattccatacctgggcaattcttacagcctgctggataaatttgacacaaatagtaattcagtcagctttaacctgttagaacaagatccgagtggcgcaaccacgaagtctgccatgctgacaaatctgatcatttttggtccaggtcctgtactgaataaaaatgaagtacgcggcatcgttctccgcgtggacaataagaactacttcccatgccgtgacggcttcggttcgatcatgcagatggctttctgtccggagtacgttccgacgtttgataatgttattgagaatatcacgagtttaacaatcggtaagtcaaaatattttcaagatccggcccttctccttatgcatgaactgattcacgtgctgcacggcttatatggtatgcaagtgtcctcgcatgaaatcattccgtccaaacaggaaatttatatgcagcatacctacccgatttcagctgaagagttgtttacgtttggtggccaggacgcgaatttgatctccatcgacatcaaaaacgatctgtatgagaaaacattaaatgactataaagcgattgcgaacaaactgtctcaggtgactagctgcaacgatcctaacattgatattgattcctacaaacaaatttatcaacagaaataccagttcgataaagacagcaatggtcagtatatcgtaaacgaagataaatttcagatcctgtataacagcattatgtatggctttaccgaaattgagttggggaagaaatttaacattaaaacccgtctgtcttattttagtatgaaccatgatccggtgaaaatccccaatctgcttgatgataccatttataatgataccgaagggttcaacattgaatctaaggatctgaaatccgaatacaaaggccaaaatatgcgtgttaatactaacgctttccgtaatgttgatggtagtggactcgtctcgaaactgattgggttgtgtgtcgacggcatcattacctccaaaactaaatctctgatagaaggtagatttggcggtttcacgggcgcacgcaaatcagcgcgtaaacgtaagaaccaggcgctagcgggcggtggcggtagcggcggtggcggtagcggcggtggcggtagcgcactagtgctgcagtgtatcaaggttaacaactgggatttattcttcagcccgagtgaagacaacttcaccaacgacctgaacaaaggtgaagaaatcacctcagatactaacatcgaagcagccgaagaaaacatctcgctggacctgatccagcagtactacctgacctttaatttcgacaacgagccggaaaacatttctatcgaaaacctgagctctgatatcatcggccagctggaactgatgccgaacatcgaacgtttcccaaacggtaaaaagtacgagctggacaaatataccatgttccactacctgcgcgcgcaggaatttgaacacggcaaatcccgtatcgcactgactaactccgttaacgaagctctgctcaacccgtcccgtgtatacaccttcttctctagcgactacgtgaaaaaggtcaacaaagcgactgaagctgcaatgttcttgggttgggttgaacagcttgtttatgattttaccgacgagacgtccgaagtatctactaccgacaaaattgcggatatcactatcatcatcccgtacatcggtccggctctgaacattggcaacatgctgtacaaagacgacttcgttggcgcactgatcttctccggtgcggtgatcctgctggagttcatcccggaaatcgccatcccggtactgggcacctttgctctggtttcttacattgcaaacaaggttctgactgtacaaaccatcgacaacgcgctgagcaaacgtaacgaaaaatgggatgaagtttacaaatatatcgtgaccaactggctggctaaggttaatactcagatcgacctcatccgcaaaaaaatgaaagaagcactggaaaaccaggcggaagctaccaaggcaatcattaactaccagtacaaccagtacaccgaggaagaaaaaaacaacatcaacttcaacatcgacgatctgtcctctaaactgaacgaatccatcaacaaagctatgatcaacatcaacaagttcctgaaccagtgctctgtaagctatctgatgaactccatgatcccgtacggtgttaaacgtctggaggacttcgatgcgtctctgaaagacgccctgctgaaatacatttacgacaaccgtggcactctgatcggtcaggttgatcgtctgaaggacaaagtgaacaataccttatcgaccgacatcccttttcagctcagtaaatatgtcgataaccaacgccttttgtccactctagactag

SEQ ID NO: 85 - protein, 911 aa, Artificial Sequence
  Synthetic
GSMPITINNFRYSDPVNNDTIIMMEPPYCKGLDIYYKAFKITDRIWIVPERYEFGTKPEDFNPPSSLIEGASEYYDPNYLRTDSDKDRFLQTMVKLFNRIKNNVAGEALLDKIINAIPYLGNSYSLLDKFDTNSNSVSFNLLEQDPSGATTKSAMLTNLIIFGPGPVLNKNEVRGIVLRVDNKNYFPCRDGFGSIMQMAFCPEYVPTFDNVIENITSLTIGKSKYFQDPALLLMHELIHVLHGLYGMQVSSHEIIPSKQEIYMQHTYPISAEELFTFGGQDANLISIDIKNDLYEKTLNDYKAIANKLSQVTSCNDPNIDIDSYKQIYQQKYQFDKDSNGQYIVNEDKFQILYNSIMYGFTEIELGKKFNIKTRLSYFSMNHDPVKIPNLLDDTIYNDTEGFNIESKDLKSEYKGQNMRVNTNAFRNVDGSGLVSKLIGLCVDGIITSKTKSLIEGRFGGFTGARKSARKRKNQALAGGGGSGGGGSGGGGSALVLQCIKVNNWDLFFSPSEDNFTNDLNKGEEITSDTNIEAAEENISLDLIQQYYLTFNFDNEPENISIENLSSDIIGQLELMPNIERFPNGKKYELDKYTMFHYLRAQEFEHGKSRIALTNSVNEALLNPSRVYTFFSSDYVKKVNKATEAAMFLGWVEQLVYDFTDETSEVSTTDKIADITIIIPYIGPALNIGNMLYKDDFVGALIFSGAVILLEFIPEIAIPVLGTFALVSYIANKVLTVQTIDNALSKRNEKWDEVYKYIVTNWLAKVNTQIDLIRKKMKEALENQAEATKAIINYQYNQYTEEEKNNINFNIDDLSSKLNESINKAMININKFLNQCSVSYLMNSMIPYGVKRLEDFDASLKDALLKYIYDNRGTLIGQVDRLKDKVNNTLSTDIPFQLSKYVDNQRLLSTLD

SEQ ID NO: 86 - DNA, 180 bp, Artificial Sequence
  Synthetic
ggatccacgcacgtcgacgcgattgatggtcgttttggcggtttcacgggcgcacgcaaatcagcgcgtaaacgtaagaaccaggcgctagcgggcggtggcggtagcggcggtggcggtagcggcggtggcggtagcgcactagtgctgcagacgcacggtctagaatgataaaagctt

SEQ ID NO: 87 - DNA, 2715 bp, Artificial Sequence
  Synthetic
ggatccgaattcatgccgatcaccatcaacaacttcaactacagcgatccggtggataacaaaaacatcctgtacctggatacccatctgaataccctggcgaacgaaccggaaaaagcgtttcgtatcaccggcaacatttgggttattccggatcgttttagccgtaacagcaacccgaatctgaataaaccgccgcgtgttaccagcccgaaaagcggttattacgatccgaactatctgagcaccgatagcgataaagataccttcctgaaagaaatcatcaaactgttcaaacgcatcaacagccgtgaaattggcgaagaactgatctatcgcctgagcaccgatattccgtttccgggcaacaacaacaccccgatcaacacctttgatttcgatgtggatttcaacagcgttgatgttaaaacccgccagggtaacaattgggtgaaaaccggcagcattaacccgagcgtgattattaccggtccgcgcgaaaacattattgatccggaaaccagcacctttaaactgaccaacaacacctttgcggcgcaggaaggttttggcgcgctgagcattattagcattagcccgcgctttatgctgacctatagcaacgcgaccaacgatgttggtgaaggccgtttcagcaaaagcgaattttgcatggacccgatcctgatcctgatgcatgaactgaaccatgcgatgcataacctgtatggcatcgcgattccgaacgatcagaccattagcagcgtgaccagcaacatcttttacagccagtacaacgtgaaactggaatatgcggaaatctatgcgtttggcggtccgaccattgatctgattccgaaaagcgcgcgcaaatacttcgaagaaaaagcgctggattactatcgcagcattgcgaaacgtctgaacagcattaccaccgcgaatccgagcagcttcaacaaatatatcggcgaatataaacagaaactgatccgcaaatatcgctttgtggtggaaagcagcggcgaagttaccgttaaccgcaataaattcgtggaactgtacaacgaactgacccagatcttcaccgaatttaactatgcgaaaatctataacgtgcagaaccgtaaaatctacctgagcaacgtgtataccccggtgaccgcgaatattctggatgataacgtgtacgatatccagaacggctttaacatcccgaaaagcaacctgaacgttctgtttatgggccagaacctgagccgtaatccggcgctgcgtaaagtgaacccggaaaacatgctgtacctgttcaccaaattttgcgtcgacgcgattgatggtcgttttggcggtttcacgggcgcacgcaaatcagcgcgtaaacgtaagaaccaggcgctagcgggcggtggcggtagcggcggtggcggtagcggcggtggcggtagcgcactagtgctgcagtgtcgtgaactgctggtgaaaaacaccgatctgccgtttattggcgatatcagcgatgtgaaaaccgatatcttcctgcgcaaagatatcaacgaagaaaccgaagtgatctactacccggataacgtgagcgttgatcaggtgatcctgagcaaaaacaccagcgaacatggtcagctggatctgctgtatccgagcattgatagcgaaagcgaaattctgccgggcgaaaaccaggtgttttacgataaccgtacccagaacgtggattacctgaacagctattactacctggaaagccagaaactgagcgataacgtggaagattttacctttacccgcagcattgaagaagcgctggataacagcgcgaaagtttacacctattttccgaccctggcgaacaaagttaatgcgggtgttcagggcggtctgtttctgatgtgggcgaacgatgtggtggaagatttcaccaccaacatcctgcgtaaagataccctggataaaatcagcgatgttagcgcgattattccgtatattggtccggcgctgaacattagcaatagcgtgcgtcgtggcaattttaccgaagcgtttgcggttaccggtgtgaccattctgctggaagcgtttccggaatttaccattccggcgctgggtgcgtttgtgatctatagcaaagtgcaggaacgcaacgaaatcatcaaaaccatcgataactgcctggaacagcgtattaaacgctggaaagatagctatgaatggatgatgggcacctggctgagccgtattatcacccagttcaacaacatcagctaccagatgtacgatagcctgaactatcaggcgggtgcgattaaagcgaaaatcgatctggaatacaaaaaatacagcggcagcgataaagaaaacatcaaaagccaggttgaaaacctgaaaaacagcctggatgtgaaaattagcgaagcgatgaataacatcaacaaattcatccgcgaatgcagcgtgacctacctgttcaaaaacatgctgccgaaagtgatcgatgaactgaacgaatttgatcgcaacaccaaagcgaaactgatcaacctgatcgatagccacaacattattctggtgggcgaagtggataaactgaaagcgaaagttaacaacagcttccagaacaccatcccgtttaacatcttcagctataccaacaacagcctgctgaaagatatcatcaacgaatacttcaatctagactag

SEQ ID NO: 88 - protein, 904 aa, Artificial Sequence
  Synthetic
GSEFMPITINNFNYSDPVDNKNILYLDTHLNTLANEPEKAFRITGNIWVIPDRFSRNSNPNLNKPPRVTSPKSGYYDPNYLSTDSDKDTFLKEIIKLFKRINSREIGEELIYRLSTDIPFPGNNNTPINTFDFDVDFNSVDVKTRQGNNWVKTGSINPSVIITGPRENIIDPETSTFKLTNNTFAAQEGFGALSIISISPRFMLTYSNATNDVGEGRFSKSEFCMDPILILMHELNHAMHNLYGIAIPNDQTISSVTSNIFYSQYNVKLEYAEIYAFGGPTIDLIPKSARKYFEEKALDYYRSIAKRLNSITTANPSSFNKYIGEYKQKLIRKYRFVVESSGEVTVNRNKFVELYNELTQIFTEFNYAKIYNVQNRKIYLSNVYTPVTANILDDNVYDIQNGFNIPKSNLNVLFMGQNLSRNPALRKVNPENMLYLFTKFCVDAIDGRFGGFTGARKSARKRKNQALAGGGGSGGGGSGGGGSALVLQCRELLVKNTDLPFIGDISDVKTDIFLRKDINEETEVIYYPDNVSVDQVILSKNTSEHGQLDLLYPSIDSESEILPGENQVFYDNRTQNVDYLNSYYYLESQKLSDNVEDFTFTRSIEEALDNSAKVYTYFPTLANKVNAGVQGGLFLMWANDVVEDFTTNILRKDTLDKISDVSAIIPYIGPALNISNSVRRGNFTEAFAVTGVTILLEAFPEFTIPALGAFVIYSKVQERNEIIKTIDNCLEQRIKRWKDSYEWMMGTWLSRIITQFNNISYQMYDSLNYQAGAIKAKIDLEYKKYSGSDKENIKSQVENLKNSLDVKISEAMNNINKFIRECSVTYLFKNMLPKVIDELNEFDRNTKAKLINLIDSHNIILVGEVDKLKAKVNNSFQNTIPFNIFSYTNNSLLKDIINEYFNLD

SEQ ID NO: 89 - protein, 17 aa, Artificial Sequence
  Synthetic
YGGFLRRIRPKLKWDNQ

SEQ ID NO: 90 - DNA, 2709 bp, Artificial Sequence
  Synthetic
ggatccatggagttcgttaacaaacagttcaactataaagacccagttaacggtgttgacattgcttacatcaaaatcccgaacgctggccagatgcagccggtaaaggcattcaaaatccacaacaaaatctgggttatcccggaacgtgatacctttactaacccggaagaaggtgacctgaacccgccaccggaagcgaaacaggtgccggtatcttactatgactccacctacctgtctaccgataacgaaaaggacaactacctgaaaggtgttactaaactgttcgagcgtatttactccaccgacctgggccgtatgctgctgactagcatcgttcgcggtatcccgttctggggcggttctaccatcgataccgaactgaaagtaatcgacactaactgcatcaacgttattcagccggacggttcctatcgttccgaagaactgaacctggtgatcatcggcccgtctgctgatatcatccagttcgagtgtaagagctttggtcacgaagttctgaacctcacccgtaacggctacggttccactcagtacatccgtttctctccggacttcaccttcggttttgaagaatccctggaagtagacacgaacccactgctgggcgctggtaaattcgcaactgatcctgcggttaccctggctcacgaactgattcatgcaggccaccgcctgtacggtatcgccatcaatccgaaccgtgtcttcaaagttaacaccaacgcgtattacgagatgtccggtctggaagttagcttcgaagaactgcgtacttttggcggtcacgacgctaaattcatcgactctctgcaagaaaacgagttccgtctgtactactataacaagttcaaagatatcgcatccaccctgaacaaagcgaaatccatcgtgggtaccactgcttctctccagtacatgaagaacgtttttaaagaaaaatacctgctcagcgaagacacctccggcaaattctctgtagacaagttgaaattcgataaactttacaaaatgctgactgaaatttacaccgaagacaacttcgttaagttctttaaagttctgaaccgcaaaacctatctgaacttcgacaaggcagtattcaaaatcaacatcgtgccgaaagttaactacactatctacgatggtttcaacctgcgtaacaccaacctggctgctaattttaacggccagaacacggaaatcaacaacatgaacttcacaaaactgaaaaacttcactggtctgttcgagttttacaagctgctgtgcgtcgacggcatcattacctccaaaactaaatctgacgatgacgataaatatggaggttttttgagaaggatacgaccaaaattaaagtgggataatcaagcgctagcgggcggtggcggtagcggcggtggcggtagcggcggtggcggtagcgcactagtgctgcagtgtatcaaggttaacaactgggatttattcttcagcccgagtgaagacaacttcaccaacgacctgaacaaaggtgaagaaatcacctcagatactaacatcgaagcagccgaagaaaacatctcgctggacctgatccagcagtactacctgacctttaatttcgacaacgagccggaaaacatttctatcgaaaacctgagctctgatatcatcggccagctggaactgatgccgaacatcgaacgtttcccaaacggtaaaaagtacgagctggacaaatataccatgttccactacctgcgcgcgcaggaatttgaacacggcaaatcccgtatcgcactgactaactccgttaacgaagctctgctcaacccgtcccgtgtatacaccttcttctctagcgactacgtgaaaaaggtcaacaaagcgactgaagctgcaatgttcttgggttgggttgaacagcttgtttatgattttaccgacgagacgtccgaagtatctactaccgacaaaattgcggatatcactatcatcatcccgtacatcggtccggctctgaacattggcaacatgctgtacaaagacgacttcgttggcgcactgatcttctccggtgcggtgatcctgctggagttcatcccggaaatcgccatcccggtactgggcacctttgctctggtttcttacattgcaaacaaggttctgactgtacaaaccatcgacaacgcgctgagcaaacgtaacgaaaaatgggatgaagtttacaaatatatcgtgaccaactggctggctaaggttaatactcagatcgacctcatccgcaaaaaaatgaaagaagcactggaaaaccaggcggaagctaccaaggcaatcattaactaccagtacaaccagtacaccgaggaagaaaaaaacaacatcaacttcaacatcgacgatctgtcctctaaactgaacgaatccatcaacaaagctatgatcaacatcaacaagttcctgaaccagtgctctgtaagctatctgatgaactccatgatcccgtacggtgttaaacgtctggaggacttcgatgcgtctctgaaagacgccctgctgaaatacatttacgacaaccgtggcactctgatcggtcaggttgatcgtctgaaggacaaagtgaacaataccttatcgaccgacatcccttttcagctcagtaaatatgtcgataaccaacgccttttgtccactctagactag

SEQ ID NO: 91 - protein, 902 aa, Artificial Sequence
  Synthetic
GSMEFVNKQFNYKDPVNGVDIAYIKIPNAGQMQPVKAFKIHNKIWVIPERDTFTNPEEGDLNPPPEAKQVPVSYYDSTYLSTDNEKDNYLKGVTKLFERIYSTDLGRMLLTSIVRGIPFWGGSTIDTELKVIDTNCINVIQPDGSYRSEELNLVIIGPSADIIQFECKSFGHEVLNLTRNGYGSTQYIRFSPDFTFGFEESLEVDTNPLLGAGKFATDPAVTLAHELIHAGHRLYGIAINPNRVFKVNTNAYYEMSGLEVSFEELRTFGGHDAKFIDSLQENEFRLYYYNKFKDIASTLNKAKSIVGTTASLQYMKNVFKEKYLLSEDTSGKFSVDKLKFDKLYKMLTEIYTEDNFVKFFKVLNRKTYLNFDKAVFKINIVPKVNYTIYDGFNLRNTNLAANFNGQNTEINNMNFTKLKNFTGLFEFYKLLCVDGIITSKTKSDDDDKYGGFLRRIRPKLKWDNQALAGGGGSGGGGSGGGGSALVLQCIKVNNWDLFFSPSEDNFTNDLNKGEEITSDTNIEAAEENISLDLIQQYYLTFNFDNEPENISIENLSSDIIGQLELMPNIERFPNGKKYELDKYTMFHYLRAQEFEHGKSRIALTNSVNEALLNPSRVYTFFSSDYVKKVNKATEAAMFLGWVEQLVYDFTDETSEVSTTDKIADITIIIPYIGPALNIGNMLYKDDFVGALIFSGAVILLEFIPEIAIPVLGTFALVSYIANKVLTVQTIDNALSKRNEKWDEVYKYIVTNWLAKVNTQIDLIRKKMKEALENQAEATKAIINYQYNQYTEEEKNNINFNIDDLSSKLNESINKAMININKFLNQCSVSYLMNSMIPYGVKRLEDFDASLKDALLKYIYDNRGTLIGQVDRLKDKVNNTLSTDIPFQLSKYVDNQRLLSTLD

SEQ ID NO: 92 - protein, 892 aa, Artificial Sequence
  Synthetic
GSMEFVNKQFNYKDPVNGVDIAYIKIPNAGQMQPVKAFKIHNKIWVIPERDTFTNPEEGDLNPPPEAKQVPVSYYDSTYLSTDNEKDNYLKGVTKLFERIYSTDLGRMLLTSIVRGIPFWGGSTIDTELKVIDTNCINVIQPDGSYRSEELNLVIIGPSADIIQFECKSFGHEVLNLTRNGYGSTQYIRFSPDFTFGFEESLEVDTNPLLGAGKFATDPAVTLAHELIHAGHRLYGIAINPNRVFKVNTNAYYEMSGLEVSFEELRTFGGHDAKFIDSLQENEFRLYYYNKFKDIASTLNKAKSIVGTTASLQYMKNVFKEKYLLSEDTSGKFSVDKLKFDKLYKMLTEIYTEDNFVKFFKVLNRKTYLNFDKAVFKINIVPKVNYTIYDGFNLRNTNLAANFNGQNTEINNMNFTKLKNFTGLFEFYKLLCVDGIITSKTKSDDDDKYGGFLRRIRPKLKWDNQALAGGGGSALVLQCIKVNNWDLFFSPSEDNFTNDLNKGEEITSDTNIEAAEENISLDLIQQYYLTFNFDNEPENISIENLSSDIIGQLELMPNIERFPNGKKYELDKYTMFHYLRAQEFEHGKSRIALTNSVNEALLNPSRVYTFFSSDYVKKVNKATEAAMFLGWVEQLVYDFTDETSEVSTTDKIADITIIIPYIGPALNIGNMLYKDDFVGALIFSGAVILLEFIPEIAIPVLGTFALVSYIANKVLTVQTIDNALSKRNEKWDEVYKYIVTNWLAKVNTQIDLIRKKMKEALENQAEATKAIINYQYNQYTEEEKNNINFNIDDLSSKLNESINKAMININKFLNQCSVSYLMNSMIPYGVKRLEDFDASLKDALLKYIYDNRGTLIGQVDRLKDKVNNTLSTDIPFQLSKYVDNQRLLSTLD

SEQ ID NO: 93 - protein, 897 aa, Artificial Sequence
  Synthetic
GSMEFVNKQFNYKDPVNGVDIAYIKIPNAGQMQPVKAFKIHNKIWVIPERDTFTNPEEGDLNPPPEAKQVPVSYYDSTYLSTDNEKDNYLKGVTKLFERIYSTDLGRMLLTSIVRGIPFWGGSTIDTELKVIDTNCINVIQPDGSYRSEELNLVIIGPSADIIQFECKSFGHEVLNLTRNGYGSTQYIRFSPDFTFGFEESLEVDTNPLLGAGKFATDPAVTLAHELIHAGHRLYGIAINPNRVFKVNTNAYYEMSGLEVSFEELRTFGGHDAKFIDSLQENEFRLYYYNKFKDIASTLNKAKSIVGTTASLQYMKNVFKEKYLLSEDTSGKFSVDKLKFDKLYKMLTEIYTEDNFVKFFKVLNRKTYLNFDKAVFKINIVPKVNYTIYDGFNLRNTNLAANFNGQNTEINNMNFTKLKNFTGLFEFYKLLCVDGIITSKTKSDDDDKYGGFLRRIRPKLKWDNQALAGGGGSGGGGSALVLQCIKVNNWDLFFSPSEDNFTNDLNKGEEITSDTNIEAAEENISLDLIQQYYLTFNFDNEPENISIENLSSDIIGQLELMPNIERFPNGKKYELDKYTMFHYLRAQEFEHGKSRIALTNSVNEALLNPSRVYTFFSSDYVKKVNKATEAAMFLGWVEQLVYDFTDETSEVSTTDKIADITIIIPYIGPALNIGNMLYKDDFVGALIFSGAVILLEFIPEIAIPVLGTFALVSYIANKVLTVQTIDNALSKRNEKWDEVYKYIVTNWLAKVNTQIDLIRKKMKEALENQAEATKAIINYQYNQYTEEEKNNINFNIDDLSSKLNESINKAMININKFLNQCSVSYLMNSMIPYGVKRLEDFDASLKDALLKYIYDNRGTLIGQVDRLKDKVNNTLSTDIPFQLSKYVDNQRLLSTLD

SEQ ID NO: 94 - protein, 907 aa, Artificial Sequence
  Synthetic
GSMEFVNKQFNYKDPVNGVDIAYIKIPNAGQMQPVKAFKIHNKIWVIPERDTFTNPEEGDLNPPPEAKQVPVSYYDSTYLSTDNEKDNYLKGVTKLFERIYSTDLGRMLLTSIVRGIPFWGGSTIDTELKVIDTNCINVIQPDGSYRSEELNLVIIGPSADIIQFECKSFGHEVLNLTRNGYGSTQYIRFSPDFTFGFEESLEVDTNPLLGAGKFATDPAVTLAHELIHAGHRLYGIAINPNRVFKVNTNAYYEMSGLEVSFEELRTFGGHDAKFIDSLQENEFRLYYYNKFKDIASTLNKAKSIVGTTASLQYMKNVFKEKYLLSEDTSGKFSVDKLKFDKLYKMLTEIYTEDNFVKFFKVLNRKTYLNFDKAVFKINIVPKVNYTIYDGFNLRNTNLAANFNGQNTEINNMNFTKLKNFTGLFEFYKLLCVDGIITSKTKSDDDDKYGGFLRRIRPKLKWDNQALAGGGGSGGGGSGGGGSGGGGSALVLQCIKVNNWDLFFSPSEDNFTNDLNKGEEITSDTNIEAAEENISLDLIQQYYLTFNFDNEPENISIENLSSDIIGQLELMPNIERFPNGKKYELDKYTMFHYLRAQEFEHGKSRIALTNSVNEALLNPSRVYTFFSSDYVKKVNKATEAAMFLGWVEQLVYDFTDETSEVSTTDKIADITIIIPYIGPALNIGNMLYKDDFVGALIFSGAVILLEFIPEIAIPVLGTFALVSYIANKVLTVQTIDNALSKRNEKWDEVYKYIVTNWLAKVNTQIDLIRKKMKEALENQAEATKAIINYQYNQYTEEEKNNINFNIDDLSSKLNESINKAMININKFLNQCSVSYLMNSMIPYGVKRLEDFDASLKDALLKYIYDNRGTLIGQVDRLKDKVNNTLSTDIPFQLSKYVDNQRLLSTLD

SEQ ID NO: 95 - protein, 913 aa, Artificial Sequence
  Synthetic
GSEFMPITINNFNYSDPVDNKNILYLDTHLNTLANEPEKAFRITGNIWVIPDRFSRNSNPNLNKPPRVTSPKSGYYDPNYLSTDSDKDTFLKEIIKLFKRINSREIGEELIYRLSTDIPFPGNNNTPINTFDFDVDFNSVDVKTRQGNNWVKTGSINPSVIITGPRENIIDPETSTFKLTNNTFAAQEGFGALSIISISPRFMLTYSNATNDVGEGRFSKSEFCMDPILILMHELNHAMHNLYGIAIPNDQTISSVTSNIFYSQYNVKLEYAEIYAFGGPTIDLIPKSARKYFEEKALDYYRSIAKRLNSITTANPSSFNKYIGEYKQKLIRKYRFVVESSGEVTVNRNKFVELYNELTQIFTEFNYAKIYNVQNRKIYLSNVYTPVTANILDDNVYDIQNGFNIPKSNLNVLFMGQNLSRNPALRKVNPENMLYLFTKFCVDGIITSKTKSDDDDKYGGFLRRIRPKLKWDNQALAGGGGSGGGGSGGGGSALVLQCRELLVKNTDLPFIGDISDVKTDIFLRKDINEETEVIYYPDNVSVDQVILSKNTSEHGQLDLLYPSIDSESEILPGENQVFYDNRTQNVDYLNSYYYLESQKLSDNVEDFTFTRSIEEALDNSAKVYTYFPTLANKVNAGVQGGLFLMWANDVVEDFTTNILRKDTLDKISDVSAIIPYIGPALNISNSVRRGNFTEAFAVTGVTILLEAFPEFTIPALGAFVIYSKVQERNEIIKTIDNCLEQRIKRWKDSYEWMMGTWLSRIITQFNNISYQMYDSLNYQAGAIKAKIDLEYKKYSGSDKENIKSQVENLKNSLDVKISEAMNNINKFIRECSVTYLFKNMLPKVIDELNEFDRNTKAKLINLIDSHNIILVGEVDKLKAKVNNSFQNTIPFNIFSYTNNSLLKDIINEYFNLD

SEQ ID NO: 96 - protein, 1432 aa, Artificial Sequence
  Synthetic
GSLVRDDVDYQIFRDFAENKGKFFVGATDLSVKNKRGQNIGNALSNVPMIDFSVADVNKRIATVVDPQYAVSVKHAKAEVHTFYYGQYNGHNDVADKENEYRVVEQNNYEPHKAWGASNLGRLEDYNMARFNKFVTEVAPIAPTDAGGGLDTYKDKNRFSSFVRIGAGRQLVYEKGVYHQEGNEKGYDLRDLSQAYRYAIAGTPYKDINIDQTMNTEGLIGFGNHNKQYSAEELKQALSQDALTNYGVLGDSGSPLFAFDKQKNQWVFLGTYDYWAGYGKKSWQEWNIYKKEFADKIKQHDNAGTVKGNGEHHWKTTGTNSHIGSTAVRLANNEGDANNGQNVTFEDNGTLVLNQNINQGAGGLFFKGDYTVKGANNDITWLGAGIDVADGKKVVWQVKNPNGDRLAKIGKGTLEINGTGVNQGQLKVGDGTVILNQKADADKKVQAFSQVGIVSGRGTLVLNSSNQINPDNLYFGFRGGRLDANGNDLTFEHIRNVDEGARIVNHNTDHASTITLTGKSLITNPNSLSVHSIQNDYDEDDYSYYYRPRRPIPQGKDLYYKNYRYYALKSGGRLNAPMPENGVAENNDWIFMGYTQEEARKNAMNHKNNRRIGDFGGFFDEENGKGHNGALNLNFNGKSAQKRFLLTGGANLNGKISVTQGNVLLSGRPTPHARDFVNKSSARKDAHFSKNNEVVFEDDWINRTFKAAEIAVNQSASFSSGRNVSDITANITATDNAKVNLGYKNGDEVCVRSDYTGYVTCNTGNLSDKALNSFDATRINGNVNLNQNAALVLGKAALWGKIQGQGNSRVSLNQHSKWHLTGDSQVHNLSLADSHIHLNNASDAQSANKYHTIKINHLSGNGHFHYLTDLAKNLGDKVLVKESASGHYQLHVQNKTGEPNQEGLDLFDASSVQDRSRLFVSLANHYVDLGALRYTIKTENGITRLYNPYAGNGRPVKPAPCVDGIITSKTKSLDDDDKYGGFLRRIRPKLKWDNQALAGGGGSGGGGSGGGGSALVLQCIKVNNWDLFFSPSEDNFTNDLNKGEEITSDTNIEAAEENISLDLIQQYYLTFNFDNEPENISIENLSSDIIGQLELMPNIERFPNGKKYELDKYTMFHYLRAQEFEHGKSRIALTNSVNEALLNPSRVYTFFSSDYVKKVNKATEAAMFLGWVEQLVYDFTDETSEVSTTDKIADITIIIPYIGPALNIGNMLYKDDFVGALIFSGAVILLEFIPEIAIPVLGTFALVSYIANKVLTVQTIDNALSKRNEKWDEVYKYIVTNWLAKVNTQIDLIRKKMKEALENQAEATKAIINYQYNQYTEEEKNNINFNIDDLSSKLNESINKAMININKFLNQCSVSYLMNSMIPYGVKRLEDFDASLKDALLKYIYDNRGTLIGQVDRLKDKVNNTLSTDIPFQLSKYVDNQRLLSTLD

SEQ ID NO: 97 - protein, 911 aa, Artificial Sequence
  Synthetic
GSMPITINNFRYSDPVNNDTIIMMEPPYCKGLDIYYKAFKITDRIWIVPERYEFGTKPEDFNPPSSLIEGASEYYDPNYLRTDSDKDRFLQTMVKLFNRIKNNVAGEALLDKIINAIPYLGNSYSLLDKFDTNSNSVSFNLLEQDPSGATTKSAMLTNLIIFGPGPVLNKNEVRGIVLRVDNKNYFPCRDGFGSIMQMAFCPEYVPTFDNVIENITSLTIGKSKYFQDPALLLMHELIHVLHGLYGMQVSSHEIIPSKQEIYMQHTYPISAEELFTFGGQDANLISIDIKNDLYEKTLNDYKAIANKLSQVTSCNDPNIDIDSYKQIYQQKYQFDKDSNGQYIVNEDKFQILYNSIMYGFTEIELGKKFNIKTRLSYFSMNHDPVKIPNLLDDTIYNDTEGFNIESKDLKSEYKGQNMRVNTNAFRNVDGSGLVSKLIGLCVDGIITSKTKSDDDDKYGGFLRRIRPKLKWDNQALAGGGGSGGGGSGGGGSALVLQCIKVNNWDLFFSPSEDNFTNDLNKGEEITSDTNIEAAEENISLDLIQQYYLTFNFDNEPENISIENLSSDIIGQLELMPNIERFPNGKKYELDKYTMFHYLRAQEFEHGKSRIALTNSVNEALLNPSRVYTFFSSDYVKKVNKATEAAMFLGWVEQLVYDFTDETSEVSTTDKIADITIIIPYIGPALNIGNMLYKDDFVGALIFSGAVILLEFIPEIAIPVLGTFALVSYIANKVLTVQTIDNALSKRNEKWDEVYKYIVTNWLAKVNTQIDLIRKKMKEALENQAEATKAIINYQYNQYTEEEKNNINFNIDDLSSKLNESINKAMININKFLNQCSVSYLMNSMIPYGVKRLEDFDASLKDALLKYIYDNRGTLIGQVDRLKDKVNNTLSTDIPFQLSKYVDNQRLLSTLD

SEQ ID NO: 98 - protein, 912 aa, Artificial Sequence
  Synthetic sequence
GSMEFVNKQFNYKDPVNGVDIAYIKIPNAGQMQPVKAFKIHNKIWVIPERDTFTNPEEGDLNPPPEAKQVPVSYYDSTYLSTDNEKDNYLKGVTKLFERIYSTDLGRMLLTSIVRGIPFWGGSTIDTELKVIDTNCINVIQPDGSYRSEELNLVIIGPSADIIQFECKSFGHEVLNLTRNGYGSTQYIRFSPDFTFGFEESLEVDTNPLLGAGKFATDPAVTLAHELIHAGHRLYGIAINPNRVFKVNTNAYYEMSGLEVSFEELRTFGGHDAKFIDSLQENEFRLYYYNKFKDIASTLNKAKSIVGTTASLQYMKNVFKEKYLLSEDTSGKFSVDKLKFDKLYKMLTEIYTEDNFVKFFKVLNRKTYLNFDKAVFKINIVPKVNYTIYDGFNLRNTNLAANFNGQNTEINNMNFTKLKNFTGLFEFYKLLCVDGIITSKTKSDDDDKYGGFLRRIRPKLKWDNQALAGGGGSGGGGSGGGGSGGGGSGGGGSALVLQCIKVNNWDLFFSPSEDNFTNDLNKGEEITSDTNIEAAEENISLDLIQQYYLTFNFDNEPENISIENLSSDIIGQLELMPNIERFPNGKKYELDKYTMFHYLRAQEFEHGKSRIALTNSVNEALLNPSRVYTFFSSDYVKKVNKATEAAMFLGWVEQLVYDFTDETSEVSTTDKIADITIIIPYIGPALNIGNMLYKDDFVGALIFSGAVILLEFIPEIAIPVLGTFALVSYIANKVLTVQTIDNALSKRNEKWDEVYKYIVTNWLAKVNTQIDLIRKKMKEALENQAEATKAIINYQYNQYTEEEKNNINFNIDDLSSKLNESINKAMININKFLNQCSVSYLMNSMIPYGVKRLEDFDASLKDALLKYIYDNRGTLIGQVDRLKDKVNNTLSTDIPFQLSKYVDNQRLLSTLD

SEQ ID NO: 99 - protein, 909 aa, Artificial Sequence
  Synthetic sequence
GSMEFVNKQFNYKDPVNGVDIAYIKIPNAGQMQPVKAFKIHNKIWVIPERDTFTNPEEGDLNPPPEAKQVPVSYYDSTYLSTDNEKDNYLKGVTKLFERIYSTDLGRMLLTSIVRGIPFWGGSTIDTELKVIDTNCINVIQPDGSYRSEELNLVIIGPSADIIQFECKSFGHEVLNLTRNGYGSTQYIRFSPDFTFGFEESLEVDTNPLLGAGKFATDPAVTLAHELIHAGHRLYGIAINPNRVFKVNTNAYYEMSGLEVSFEELRTFGGHDAKFIDSLQENEFRLYYYNKFKDIASTLNKAKSIVGTTASLQYMKNVFKEKYLLSEDTSGKFSVDKLKFDKLYKMLTEIYTEDNFVKFFKVLNRKTYLNFDKAVFKINIVPKVNYTIYDGFNLRNTNLAANFNGQNTEINNMNFTKLKNFTGLFEFYKLLCVDGIITSKTKSDDDDKYGGFLRRIRPKLKWDNQALAAEAAAKEAAAKEAAAKAGGGGSALVLQCIKVNNWDLFFSPSEDNFTNDLNKGEEITSDTNIEAAEENISLDLIQQYYLTFNFDNEPENISIENLSSDIIGQLELMPNIERFPNGKKYELDKYTMFHYLRAQEFEHGKSRIALTNSVNEALLNPSRVYTFFSSDYVKKVNKATEAAMFLGWVEQLVYDFTDETSEVSTTDKIADITIIIPYIGPALNIGNMLYKDDFVGALIFSGAVILLEFIPEIAIPVLGTFALVSYIANKVLTVQTIDNALSKRNEKWDEVYKYIVTNWLAKVNTQIDLIRKKMKEALENQAEATKAIINYQYNQYTEEEKNNINFNIDDLSSKLNESINKAMININKFLNQCSVSYLMNSMIPYGVKRLEDFDASLKDALLKYIYDNRGTLIGQVDRLKDKVNNTLSTDIPFQLSKYVDNQRLLSTLD

SEQ ID NO: 100 - protein, 910 aa, Artificial Sequence
  Synthetic sequence
GSMPVTINNFNYNDPIDNNNIIMMEPPFARGTGRYYKAFKITDRIWIIPERYTFGYKPEDFNKSSGIFNRDVCEYYDPDYLNTNDKKNIFLQTMIKLFNRIKSKPLGEKLLEMIINGIPYLGDRRVPLEEFNTNIASVTVNKLISNPGEVERKKGIFANLIIFGPGPVLNENETIDIGIQNHFASREGFGGIMQMKFCPEYVSVFNNVQENKGASIFNRRGYFSDPALILMHELIHVLHGLYGIKVDDLPIVPNEKKFFMQSTDAIQAEELYTFGGQDPSIITPSTDKSIYDKVLQNFRGIVDRLNKVLVCISDPNININIYKNKFKDKYKFVEDSEGKYSIDVESFDKLYKSLMFGFTETNIAENYKIKTRASYFSDSLPPVKIKNLLDNEIYTIEEGFNISDKDMEKEYRGQNKAINKQAYEEISKEHLAVYKIQMCVDGIITSKTKSDDDDKYGGFLRRIRPKLKWDNQALAGGGGSGGGGSGGGGSALVLQCIDVDNEDLFFIADKNSFSDDLSKNERIEYNTQSNYIENDFPINELILDTDLISKIELPSENTESLTDFNVDVPVYEKQPAIKKIFTDENTIFQYLYSQTFPLDIRDISLTSSFDDALLFSNKVYSFFSMDYIKTANKVVEAGLFAGWVKQIVNDFVIEANKSNTMDKIADISLIVPYIGLALNVGNETAKGNFENAFEIAGASILLEFIPELLIPVVGAFLLESYIDNKNKIIKTIDNALTKRNEKWSDMYGLIVAQWLSTVNTQFYTIKEGMYKALNYQAQALEEIIKYRYNIYSEKEKSNINIDFNDINSKLNEGINQAIDNINNFINGCSVSYLMKKMIPLAVEKLLDFDNTLKKNLLNYIDENKLYLIGSAEYEKSKVNKYLKTIMPFDLSIYTNDTILIEMFNKYNSLD

SEQ ID NO: 101 - protein, 898 aa, Artificial Sequence
  Synthetic sequence
GSMEFVNKQFNYKDPVNGVDIAYIKIPNAGQMQPVKAFKIHNKIWVIPERDTFTNPEEGDLNPPPEAKQVPVSYYDSTYLSTDNEKDNYLKGVTKLFERIYSTDLGRMLLTSIVRGIPFWGGSTIDTELKVIDTNCINVIQPDGSYRSEELNLVIIGPSADIIQFECKSFGHEVLNLTRNGYGSTQYIRFSPDFTFGFEESLEVDTNPLLGAGKFATDPAVTLAHELIHAGHRLYGIAINPNRVFKVNTNAYYEMSGLEVSFEELRTFGGHDAKFIDSLQENEFRLYYYNKFKDIASTLNKAKSIVGTTASLQYMKNVFKEKYLLSEDTSGKFSVDKLKFDKLYKMLTEIYTEDNFVKFFKVLNRKTYLNFDKAVFKINIVPKVNYTIYDGFNLRNTNLAANFNGQNTEINNMNFTKLKNFTGLFEFYKLLCVDGIITSKTKSDDDDKYGGFLRRIRPKLKALAGGGGSGGGGSGGGGSALVLQCIKVNNWDLFFSPSEDNFTNDLNKGEEITSDTNIEAAEENISLDLIQQYYLTFNFDNEPENISIENLSSDIIGQLELMPNIERFPNGKKYELDKYTMFHYLRAQEFEHGKSRIALTNSVNEALLNPSRVYTFFSSDYVKKVNKATEAAMFLGWVEQLVYDFTDETSEVSTTDKIADITIIIPYIGPALNIGNMLYKDDFVGALIFSGAVILLEFIPEIAIPVLGTFALVSYIANKVLTVQTIDNALSKRNEKWDEVYKYIVTNWLAKVNTQIDLIRKKMKEALENQAEATKAIINYQYNQYTEEEKNNINFNIDDLSSKLNESINKAMININKFLNQCSVSYLMNSMIPYGVKRLEDFDASLKDALLKYIYDNRGTLIGQVDRLKDKVNNTLSTDIPFQLSKYVDNQRLLSTLD

SEQ ID NO: 102 - protein, 902 aa, Artificial Sequence
  Synthetic sequence
GSMEFVNKQFNYKDPVNGVDIAYIKIPNAGQMQPVKAFKIHNKIWVIPERDTFTNPEEGDLNPPPEAKQVPVSYYDSTYLSTDNEKDNYLKGVTKLFERIYSTDLGRMLLTSIVRGIPFWGGSTIDTELKVIDTNCINVIQPDGSYRSEELNLVIIGPSADIIQFECKSFGHEVLNLTRNGYGSTQYIRFSPDFTFGFEESLEVDTNPLLGAGKFATDPAVTLAHELIHAGHRLYGIAINPNRVFKVNTNAYYEMSGLEVSFEELRTFGGHDAKFIDSLQENEFRLYYYNKFKDIASTLNKAKSIVGTTASLQYMKNVFKEKYLLSEDTSGKFSVDKLKFDKLYKMLTEIYTEDNFVKFFKVLNRKTYLNFDKAVFKINIVPKVNYTIYDGFNLRNTNLAANFNGQNTEINNMNFTKLKNFTGLFEFYKLLCVDGIITSKTKSDDDDKYGGFLRRIRPKLKWANQALAGGGGSGGGGSGGGGSALVLQCIKVNNWDLFFSPSEDNFTNDLNKGEEITSDTNIEAAEENISLDLIQQYYLTFNFDNEPENISIENLSSDIIGQLELMPNIERFPNGKKYELDKYTMFHYLRAQEFEHGKSRIALTNSVNEALLNPSRVYTFFSSDYVKKVNKATEAAMFLGWVEQLVYDFTDETSEVSTTDKIADITIIIPYIGPALNIGNMLYKDDFVGALIFSGAVILLEFIPEIAIPVLGTFALVSYIANKVLTVQTIDNALSKRNEKWDEVYKYIVTNWLAKVNTQIDLIRKKMKEALENQAEATKAIINYQYNQYTEEEKNNINFNIDDLSSKLNESINKAMININKFLNQCSVSYLMNSMIPYGVKRLEDFDASLKDALLKYIYDNRGTLIGQVDRLKDKVNNTLSTDIPFQLSKYVDNQRLLSTLD

SEQ ID NO: 103 - protein, 912 aa, Artificial Sequence
  Synthetic sequence
GSMEFVNKQFNYKDPVNGVDIAYIKIPNAGQMQPVKAFKIHNKIWVIPERDTFTNPEEGDLNPPPEAKQVPVSYYDSTYLSTDNEKDNYLKGVTKLFERIYSTDLGRMLLTSIVRGIPFWGGSTIDTELKVIDTNCINVIQPDGSYRSEELNLVIIGPSADIIQFECKSFGHEVLNLTRNGYGSTQYIRFSPDFTFGFEESLEVDTNPLLGAGKFATDPAVTLAHELIHAGHRLYGIAINPNRVFKVNTNAYYEMSGLEVSFEELRTFGGHDAKFIDSLQENEFRLYYYNKFKDIASTLNKAKSIVGTTASLQYMKNVFKEKYLLSEDTSGKFSVDKLKFDKLYKMLTEIYTEDNFVKFFKVLNRKTYLNFDKAVFKINIVPKVNYTIYDGFNLRNTNLAANFNGQNTEINNMNFTKLKNFTGLFEFYKLLCVDGIITSKTKSDDDDKYGGFLRRIRPKLKWANQALAGGGGSGGGGSGGGGSGGGGSGGGGSALVLQCIKVNNWDLFFSPSEDNFTNDLNKGEEITSDTNIEAAEENISLDLIQQYYLTFNFDNEPENISIENLSSDIIGQLELMPNIERFPNGKKYELDKYTMFHYLRAQEFEHGKSRIALTNSVNEALLNPSRVYTFFSSDYVKKVNKATEAAMFLGWVEQLVYDFTDETSEVSTTDKIADITIIIPYIGPALNIGNMLYKDDFVGALIFSGAVILLEFIPEIAIPVLGTFALVSYIANKVLTVQTIDNALSKRNEKWDEVYKYIVTNWLAKVNTQIDLIRKKMKEALENQAEATKAIINYQYNQYTEEEKNNINFNIDDLSSKLNESINKAMININKFLNQCSVSYLMNSMIPYGVKRLEDFDASLKDALLKYIYDNRGTLIGQVDRLKDKVNNTLSTDIPFQLSKYVDNQRLLSTLD

SEQ ID NO: 104 - protein, 908 aa, Artificial Sequence
  Synthetic sequence
GSMEFVNKQFNYKDPVNGVDIAYIKIPNAGQMQPVKAFKIHNKIWVIPERDTFTNPEEGDLNPPPEAKQVPVSYYDSTYLSTDNEKDNYLKGVTKLFERIYSTDLGRMLLTSIVRGIPFWGGSTIDTELKVIDTNCINVIQPDGSYRSEELNLVIIGPSADIIQFECKSFGHEVLNLTRNGYGSTQYIRFSPDFTFGFEESLEVDTNPLLGAGKFATDPAVTLAHELIHAGHRLYGIAINPNRVFKVNTNAYYEMSGLEVSFEELRTFGGHDAKFIDSLQENEFRLYYYNKFKDIASTLNKAKSIVGTTASLQYMKNVFKEKYLLSEDTSGKFSVDKLKFDKLYKMLTEIYTEDNFVKFFKVLNRKTYLNFDKAVFKINIVPKVNYTIYDGFNLRNTNLAANFNGQNTEINNMNFTKLKNFTGLFEFYKLLCVDGIITSKTKSDDDDKYGGFLRRIRPKLKALAGGGGSGGGGSGGGGSGGGGSGGGGSALVLQCIKVNNWDLFFSPSEDNFTNDLNKGEEITSDTNIEAAEENISLDLIQQYYLTFNFDNEPENISIENLSSDIIGQLELMPNIERFPNGKKYELDKYTMFHYLRAQEFEHGKSRIALTNSVNEALLNPSRVYTFFSSDYVKKVNKATEAAMFLGWVEQLVYDFTDETSEVSTTDKIADITIIIPYIGPALNIGNMLYKDDFVGALIFSGAVILLEFIPEIAIPVLGTFALVSYIANKVLTVQTIDNALSKRNEKWDEVYKYIVTNWLAKVNTQIDLIRKKMKEALENQAEATKAIINYQYNQYTEEEKNNINFNIDDLSSKLNESINKAMININKFLNQCSVSYLMNSMIPYGVKRLEDFDASLKDALLKYIYDNRGTLIGQVDRLKDKVNNTLSTDIPFQLSKYVDNQRLLSTLD

SEQ ID NO: 105 - protein, 902 aa, Artificial Sequence
  Synthetic sequence
GSMEFVNKQFNYKDPVNGVDIAYIKIPNAGQMQPVKAFKIHNKIWVIPERDTFTNPEEGDLNPPPEAKQVPVSYYDSTYLSTDNEKDNYLKGVTKLFERIYSTDLGRMLLTSIVRGIPFWGGSTIDTELKVIDTNCINVIQPDGSYRSEELNLVIIGPSADIIQFECKSFGHEVLNLTRNGYGSTQYIRFSPDFTFGFEESLEVDTNPLLGAGKFATDPAVTLAHELIHAGHRLYGIAINPNRVFKVNTNAYYEMSGLEVSFEELRTFGGHDAKFIDSLQENEFRLYYYNKFKDIASTLNKAKSIVGTTASLQYMKNVFKEKYLLSEDTSGKFSVDKLKFDKLYKMLTEIYTEDNFVKFFKVLNRKTYLNFDKAVFKINIVPKVNYTIYDGFNLRNTNLAANFNGQNTEINNMNFTKLKNFTGLFEFYKLLCVDGIITSKTKSDDDDKYGGFLRRRRRKLKWANQALAGGGGSGGGGSGGGGSALVLQCIKVNNWDLFFSPSEDNFTNDLNKGEEITSDTNIEAAEENISLDLIQQYYLTFNFDNEPENISIENLSSDIIGQLELMPNIERFPNGKKYELDKYTMFHYLRAQEFEHGKSRIALTNSVNEALLNPSRVYTFFSSDYVKKVNKATEAAMFLGWVEQLVYDFTDETSEVSTTDKIADITIIIPYIGPALNIGNMLYKDDFVGALIFSGAVILLEFIPEIAIPVLGTFALVSYIANKVLTVQTIDNALSKRNEKWDEVYKYIVTNWLAKVNTQIDLIRKKMKEALENQAEATKAIINYQYNQYTEEEKNNINFNIDDLSSKLNESINKAMININKFLNQCSVSYLMNSMIPYGVKRLEDFDASLKDALLKYIYDNRGTLIGQVDRLKDKVNNTLSTDIPFQLSKYVDNQRLLSTLD

SEQ ID NO: 106 - protein, 898 aa, Artificial Sequence
  Synthetic sequence
GSMEFVNKQFNYKDPVNGVDIAYIKIPNAGQMQPVKAFKIHNKIWVIPERDTFTNPEEGDLNPPPEAKQVPVSYYDSTYLSTDNEKDNYLKGVTKLFERIYSTDLGRMLLTSIVRGIPFWGGSTIDTELKVIDTNCINVIQPDGSYRSEELNLVIIGPSADIIQFECKSFGHEVLNLTRNGYGSTQYIRFSPDFTFGFEESLEVDTNPLLGAGKFATDPAVTLAHELIHAGHRLYGIAINPNRVFKVNTNAYYEMSGLEVSFEELRTFGGHDAKFIDSLQENEFRLYYYNKFKDIASTLNKAKSIVGTTASLQYMKNVFKEKYLLSEDTSGKFSVDKLKFDKLYKMLTEIYTEDNFVKFFKVLNRKTYLNFDKAVFKINIVPKVNYTIYDGFNLRNTNLAANFNGQNTEINNMNFTKLKNFTGLFEFYKLLCVDGIITSKTKSDDDDKYGGFLRRRRRKLKALAGGGGSGGGGSGGGGSALVLQCIKVNNWDLFFSPSEDNFTNDLNKGEEITSDTNIEAAEENISLDLIQQYYLTFNFDNEPENISIENLSSDIIGQLELMPNIERFPNGKKYELDKYTMFHYLRAQEFEHGKSRIALTNSVNEALLNPSRVYTFFSSDYVKKVNKATEAAMFLGWVEQLVYDFTDETSEVSTTDKIADITIIIPYIGPALNIGNMLYKDDFVGALIFSGAVILLEFIPEIAIPVLGTFALVSYIANKVLTVQTIDNALSKRNEKWDEVYKYIVTNWLAKVNTQIDLIRKKMKEALENQAEATKAIINYQYNQYTEEEKNNINFNIDDLSSKLNESINKAMININKFLNQCSVSYLMNSMIPYGVKRLEDFDASLKDALLKYIYDNRGTLIGQVDRLKDKVNNTLSTDIPFQLSKYVDNQRLLSTLD

SEQ ID NO: 107 - protein, 902 aa, Artificial Sequence
  Synthetic sequence
GSMEFVNKQFNYKDPVNGVDIAYIKIPNAGQMQPVKAFKIHNKIWVIPERDTFTNPEEGDLNPPPEAKQVPVSYYDSTYLSTDNEKDNYLKGVTKLFERIYSTDLGRMLLTSIVRGIPFWGGSTIDTELKVIDTNCINVIQPDGSYRSEELNLVIIGPSADIIQFECKSFGHEVLNLTRNGYGSTQYIRFSPDFTFGFEESLEVDTNPLLGAGKFATDPAVTLAHELIHAGHRLYGIAINPNRVFKVNTNAYYEMSGLEVSFEELRTFGGHDAKFIDSLQENEFRLYYYNKFKDIASTLNKAKSIVGTTASLQYMKNVFKEKYLLSEDTSGKFSVDKLKFDKLYKMLTEIYTEDNFVKFFKVLNRKTYLNFDKAVFKINIVPKVNYTIYDGFNLRNTNLAANFNGQNTEINNMNFTKLKNFTGLFEFYKLLCVDGIITSKTKSDDDDKYGGFLGARKSARKRKNQALAGGGGSGGGGSGGGGSALVLQCIKVNNWDLFFSPSEDNFTNDLNKGEEITSDTNIEAAEENISLDLIQQYYLTFNFDNEPENISIENLSSDIIGQLELMPNIERFPNGKKYELDKYTMFHYLRAQEFEHGKSRIALTNSVNEALLNPSRVYTFFSSDYVKKVNKATEAAMFLGWVEQLVYDFTDETSEVSTTDKIADITIIIPYIGPALNIGNMLYKDDFVGALIFSGAVILLEFIPEIAIPVLGTFALVSYIANKVLTVQTIDNALSKRNEKWDEVYKYIVTNWLAKVNTQIDLIRKKMKEALENQAEATKAIINYQYNQYTEEEKNNINFNIDDLSSKLNESINKAMININKFLNQCSVSYLMNSMIPYGVKRLEDFDASLKDALLKYIYDNRGTLIGQVDRLKDKVNNTLSTDIPFQLSKYVDNQRLLSTLD

SEQ ID NO: 108 - protein, 22 aa, Artificial Sequence
  Synthetic sequence
YGGFMRRVGRPEWWMDYQKRYG

SEQ ID NO: 109 - protein, 15 aa, Artificial Sequence
  Synthetic sequence
VGRPEWWMDYQKRYG

SEQ ID NO: 110 - DNA, 2724 bp, Artificial Sequence
  Synthetic sequence
ggatccatggagttcgttaacaaacagttcaactataaagacccagttaacggtgttgacattgcttacatcaaaatcccgaacgctggccagatgcagccggtaaaggcattcaaaatccacaacaaaatctgggttatcccggaacgtgatacctttactaacccggaagaaggtgacctgaacccgccaccggaagcgaaacaggtgccggtatcttactatgactccacctacctgtctaccgataacgaaaaggacaactacctgaaaggtgttactaaactgttcgagcgtatttactccaccgacctgggccgtatgctgctgactagcatcgttcgcggtatcccgttctggggcggttctaccatcgataccgaactgaaagtaatcgacactaactgcatcaacgttattcagccggacggttcctatcgttccgaagaactgaacctggtgatcatcggcccgtctgctgatatcatccagttcgagtgtaagagctttggtcacgaagttctgaacctcacccgtaacggctacggttccactcagtacatccgtttctctccggacttcaccttcggttttgaagaatccctggaagtagacacgaacccactgctgggcgctggtaaattcgcaactgatcctgcggttaccctggctcacgaactgattcatgcaggccaccgcctgtacggtatcgccatcaatccgaaccgtgtcttcaaagttaacaccaacgcgtattacgagatgtccggtctggaagttagcttcgaagaactgcgtacttttggcggtcacgacgctaaattcatcgactctctgcaagaaaacgagttccgtctgtactactataacaagttcaaagatatcgcatccaccctgaacaaagcgaaatccatcgtgggtaccactgcttctctccagtacatgaagaacgtttttaaagaaaaatacctgctcagcgaagacacctccggcaaattctctgtagacaagttgaaattcgataaactttacaaaatgctgactgaaatttacaccgaagacaacttcgttaagttctttaaagttctgaaccgcaaaacctatctgaacttcgacaaggcagtattcaaaatcaacatcgtgccgaaagttaactacactatctacgatggtttcaacctgcgtaacaccaacctggctgctaattttaacggccagaacacggaaatcaacaacatgaacttcacaaaactgaaaaacttcactggtctgttcgagttttacaagctgctgtgcgtcgacggcatcattacctccaaaactaaatctgacgatgacgataaatacggtggtttcatgcgtcgtgtcggtcgcccggaatggtggatggactatcaaaagcgttacggcgcgctagcgggcggtggcggtagcggcggtggcggtagcggcggtggcggtagcgcactagtgctgcagtgtatcaaggttaacaactgggatttattcttcagcccgagtgaagacaacttcaccaacgacctgaacaaaggtgaagaaatcacctcagatactaacatcgaagcagccgaagaaaacatctcgctggacctgatccagcagtactacctgacctttaatttcgacaacgagccggaaaacatttctatcgaaaacctgagctctgatatcatcggccagctggaactgatgccgaacatcgaacgtttcccaaacggtaaaaagtacgagctggacaaatataccatgttccactacctgcgcgcgcaggaatttgaacacggcaaatcccgtatcgcactgactaactccgttaacgaagctctgctcaacccgtcccgtgtatacaccttcttctctagcgactacgtgaaaaaggtcaacaaagcgactgaagctgcaatgttcttgggttgggttgaacagcttgtttatgattttaccgacgagacgtccgaagtatctactaccgacaaaattgcggatatcactatcatcatcccgtacatcggtccggctctgaacattggcaacatgctgtacaaagacgacttcgttggcgcactgatcttctccggtgcggtgatcctgctggagttcatcccggaaatcgccatcccggtactgggcacctttgctctggtttcttacattgcaaacaaggttctgactgtacaaaccatcgacaacgcgctgagcaaacgtaacgaaaaatgggatgaagtttacaaatatatcgtgaccaactggctggctaaggttaatactcagatcgacctcatccgcaaaaaaatgaaagaagcactggaaaaccaggcggaagctaccaaggcaatcattaactaccagtacaaccagtacaccgaggaagaaaaaaacaacatcaacttcaacatcgacgatctgtcctctaaactgaacgaatccatcaacaaagctatgatcaacatcaacaagttcctgaaccagtgctctgtaagctatctgatgaactccatgatcccgtacggtgttaaacgtctggaggacttcgatgcgtctctgaaagacgccctgctgaaatacatttacgacaaccgtggcactctgatcggtcaggttgatcgtctgaaggacaaagtgaacaataccttatcgaccgacatcccttttcagctcagtaaatatgtcgataaccaacgccttttgtccactctagactag

SEQ ID NO: 111 - protein, 907 aa, Artificial Sequence
  Synthetic sequence
GSMEFVNKQFNYKDPVNGVDIAYIKIPNAGQMQPVKAFKIHNKIWVIPERDTFTNPEEGDLNPPPEAKQVPVSYYDSTYLSTDNEKDNYLKGVTKLFERIYSTDLGRMLLTSIVRGIPFWGGSTIDTELKVIDTNCINVIQPDGSYRSEELNLVIIGPSADIIQFECKSFGHEVLNLTRNGYGSTQYIRFSPDFTFGFEESLEVDTNPLLGAGKFATDPAVTLAHELIHAGHRLYGIAINPNRVFKVNTNAYYEMSGLEVSFEELRTFGGHDAKFIDSLQENEFRLYYYNKFKDIASTLNKAKSIVGTTASLQYMKNVFKEKYLLSEDTSGKFSVDKLKFDKLYKMLTEIYTEDNFVKFFKVLNRKTYLNFDKAVFKINIVPKVNYTIYDGFNLRNTNLAANFNGQNTEINNMNFTKLKNFTGLFEFYKLLCVDGIITSKTKSDDDDKYGGFMRRVGRPEWWMDYQKRYGALAGGGGSGGGGSGGGGSALVLQCIKVNNWDLFFSPSEDNFTNDLNKGEEITSDTNIEAAEENISLDLIQQYYLTFNFDNEPENISIENLSSDIIGQLELMPNIERFPNGKKYELDKYTMFHYLRAQEFEHGKSRIALTNSVNEALLNPSRVYTFFSSDYVKKVNKATEAAMFLGWVEQLVYDFTDETSEVSTTDKIADITIIIPYIGPALNIGNMLYKDDFVGALIFSGAVILLEFIPEIAIPVLGTFALVSYIANKVLTVQTIDNALSKRNEKWDEVYKYIVTNWLAKVNTQIDLIRKKMKEALENQAEATKAIINYQYNQYTEEEKNNINFNIDDLSSKLNESINKAMININKFLNQCSVSYLMNSMIPYGVKRLEDFDASLKDALLKYIYDNRGTLIGQVDRLKDKVNNTLSTDIPFQLSKYVDNQRLLSTLD

SEQ ID NO: 112 - protein, 902 aa, Artificial Sequence
  Synthetic sequence
GSMEFVNKQFNYKDPVNGVDIAYIKIPNAGQMQPVKAFKIHNKIWVIPERDTFTNPEEGDLNPPPEAKQVPVSYYDSTYLSTDNEKDNYLKGVTKLFERIYSTDLGRMLLTSIVRGIPFWGGSTIDTELKVIDTNCINVIQPDGSYRSEELNLVIIGPSADIIQFECKSFGHEVLNLTRNGYGSTQYIRFSPDFTFGFEESLEVDTNPLLGAGKFATDPAVTLAHELIHAGHRLYGIAINPNRVFKVNTNAYYEMSGLEVSFEELRTFGGHDAKFIDSLQENEFRLYYYNKFKDIASTLNKAKSIVGTTASLQYMKNVFKEKYLLSEDTSGKFSVDKLKFDKLYKMLTEIYTEDNFVKFFKVLNRKTYLNFDKAVFKINIVPKVNYTIYDGFNLRNTNLAANFNGQNTEINNMNFTKLKNFTGLFEFYKLLCVDGIITSKTKSLIEGRNKALNDLCIKVNNWDLFFSPSEDNFTNDLNKGEEITSDTNIEAAEENISLDLIQQYYLTFNFDNEPENISIENLSSDIIGQLELMPNIERFPNGKKYELDKYTMFHYLRAQEFEHGKSRIALTNSVNEALLNPSRVYTFFSSDYVKKVNKATEAAMFLGWVEQLVYDFTDETSEVSTTDKIADITIIIPYIGPALNIGNMLYKDDFVGALIFSGAVILLEFIPEIAIPVLGTFALVSYIANKVLTVQTIDNALSKRNEKWDEVYKYIVTNWLAKVNTQIDLIRKKMKEALENQAEATKAIINYQYNQYTEEEKNNINFNIDDLSSKLNESINKAMININKFLNQCSVSYLMNSMIPYGVKRLEDFDASLKDALLKYIYDNRGTLIGQVDRLKDKVNNTLSTDIPFQLSKYVDNQRLLSTLEGGGGSGGGGSGGGGSALVVGRPEWWMDYQKRYG

SEQ ID NO: 113 - protein, 900 aa, Artificial Sequence
  Synthetic sequence
GSMEFVNKQFNYKDPVNGVDIAYIKIPNAGQMQPVKAFKIHNKIWVIPERDTFTNPEEGDLNPPPEAKQVPVSYYDSTYLSTDNEKDNYLKGVTKLFERIYSTDLGRMLLTSIVRGIPFWGGSTIDTELKVIDTNCINVIQPDGSYRSEELNLVIIGPSADIIQFECKSFGHEVLNLTRNGYGSTQYIRFSPDFTFGFEESLEVDTNPLLGAGKFATDPAVTLAHELIHAGHRLYGIAINPNRVFKVNTNAYYEMSGLEVSFEELRTFGGHDAKFIDSLQENEFRLYYYNKFKDIASTLNKAKSIVGTTASLQYMKNVFKEKYLLSEDTSGKFSVDKLKFDKLYKMLTEIYTEDNFVKFFKVLNRKTYLNFDKAVFKINIVPKVNYTIYDGFNLRNTNLAANFNGQNTEINNMNFTKLKNFTGLFEFYKLLCVDGIITSKTKSDDDDKVGRPEWWMDYQKRYGALAGGGGSGGGGSGGGGSALVLQCIKVNNWDLFFSPSEDNFTNDLNKGEEITSDTNIEAAEENISLDLIQQYYLTFNFDNEPENISIENLSSDIIGQLELMPNIERFPNGKKYELDKYTMFHYLRAQEFEHGKSRIALTNSVNEALLNPSRVYTFFSSDYVKKVNKATEAAMFLGWVEQLVYDFTDETSEVSTTDKIADITIIIPYIGPALNIGNMLYKDDFVGALIFSGAVILLEFIPEIAIPVLGTFALVSYIANKVLTVQTIDNALSKRNEKWDEVYKYIVTNWLAKVNTQIDLIRKKMKEALENQAEATKAIINYQYNQYTEEEKNNINFNIDDLSSKLNESINKAMININKFLNQCSVSYLMNSMIPYGVKRLEDFDASLKDALLKYIYDNRGTLIGQVDRLKDKVNNTLSTDIPFQLSKYVDNQRLLSTLD

SEQ ID NO: 114 - protein, 31 aa, Artificial Sequence
  Synthetic sequence
YGGFMTSEKSQTPLVTLFKNAIIKNAYKKGE

SEQ ID NO: 115 - protein, 924 aa, Artificial Sequence
  Synthetic sequence
GSMTWPVKDFNYSDPVNDNDILYLRIPQNKLITTPVKAFMITQNIWVIPERFSSDTNPSLSKPPRPTSKYQSYYDPSYLSTDEQKDTFLKGIIKLFKRINERDIGKKLINYLVVGSPFMGDSSTPEDTFDFTRHTTNIAVEKFENGSWKVTNIITPSVLIFGPLPNILDYTASLTLQGQQSNPSFEGFGTLSILKVAPEFLLTFSDVTSNQSSAVLGKSIFCMDPVIALMHELTHSLHQLYGINIPSDKRIRPQVSEGFFSQDGPNVQFEELYTFGGLDVEIIPQIERSQLREKALGHYKDIAKRLNNINKTIPSSWISNIDKYKKIFSEKYNFDKDNTGNFVVNIDKFNSLYSDLTNVMSEVVYSSQYNVKNRTHYFSRHYLPVFANILDDNIYTIRDGFNLTNKGFNIENSGQNIERNPALQKLSSESVVDLFTKVCVDGIITSKTKSLIEGRYGGFMTSEKSQTPLVTLFKNAIIKNAYKKGEALAGGGGSGGGGSGGGGSALVLQCIKVKNNRLPYVADKDSISQEIFENKIITDETNVQNYSDKFSLDESILDGQVPINPEIVDPLLPNVNMEPLNLPGEEIVFYDDITKYVDYLNSYYYLESQKLSNNVENITLTTSVEEALGYSNKIYTFLPSLAEKVNKGVQAGLFLNWANEVVEDFTTNIMKKDTLDKISDVSVIIPYIGPALNIGNSALRGNFNQAFATAGVAFLLEGFPEFTIPALGVFTFYSSIQEREKIIKTIENCLEQRVKRWKDSYQWMVSNWLSRITTQFNHINYQMYDSLSYQADAIKAKIDLEYKKYSGSDKENIKSQVENLKNSLDVKISEAMNNINKFIRECSVTYLFKNMLPKVIDELNKFDLRTKTELINLIDSHNIILVGEVDRLKAKVNESFENTMPFNIFSYTNNSLLKDIINEYFNLD

SEQ ID NO: 116 - protein, 924 aa, Artificial Sequence
  Synthetic sequence
GSMPVTINNFNYNDPIDNNNIIMMEPPFARGTGRYYKAFKITDRIWIIPERYTFGYKPEDFNKSSGIFNRDVCEYYDPDYLNTNDKKNIFLQTMIKLFNRIKSKPLGEKLLEMIINGIPYLGDRRVPLEEFNTNIASVTVNKLISNPGEVERKKGIFANLIIFGPGPVLNENETIDIGIQNHFASREGFGGIMQMKFCPEYVSVFNNVQENKGASIFNRRGYFSDPALILMHELIHVLHGLYGIKVDDLPIVPNEKKFFMQSTDAIQAEELYTFGGQDPSIITPSTDKSIYDKVLQNFRGIVDRLNKVLVCISDPNININIYKNKFKDKYKFVEDSEGKYSIDVESFDKLYKSLMFGFTETNIAENYKIKTRASYFSDSLPPVKIKNLLDNEIYTIEEGFNISDKDMEKEYRGQNKAINKQAYEEISKEHLAVYKIQMCVDGIITSKTKSLIEGRYGGFMTSEKSQTPLVTLFKNAIIKNAYKKGEALAGGGGSGGGGSGGGGSALVLQCIDVDNEDLFFIADKNSFSDDLSKNERIEYNTQSNYIENDFPINELILDTDLISKIELPSENTESLTDFNVDVPVYEKQPAIKKIFTDENTIFQYLYSQTFPLDIRDISLTSSFDDALLFSNKVYSFFSMDYIKTANKVVEAGLFAGWVKQIVNDFVIEANKSNTMDKIADISLIVPYIGLALNVGNETAKGNFENAFEIAGASILLEFIPELLIPVVGAFLLESYIDNKNKIIKTIDNALTKRNEKWSDMYGLIVAQWLSTVNTQFYTIKEGMYKALNYQAQALEEIIKYRYNIYSEKEKSNINIDFNDINSKLNEGINQAIDNINNFINGCSVSYLMKKMIPLAVEKLLDFDNTLKKNLLNYIDENKLYLIGSAEYEKSKVNKYLKTIMPFDLSIYTNDTILIEMFNKYNSLD

SEQ ID NO: 117 - protein, 9 aa, Artificial Sequence
  Synthetic sequence
RPPGFSPFR

SEQ ID NO: 118 - protein, 8 aa, Artificial Sequence
  Synthetic sequence
RPPGFSPF

SEQ ID NO: 119 - DNA, 2697 bp, Artificial Sequence
  Synthetic sequence
ggatccatggagttcgttaacaaacagttcaactataaagacccagttaacggtgttgacattgcttacatcaaaatcccgaacgctggccagatgcagccggtaaaggcattcaaaatccacaacaaaatctgggttatcccggaacgtgatacctttactaacccggaagaaggtgacctgaacccgccaccggaagcgaaacaggtgccggtatcttactatgactccacctacctgtctaccgataacgaaaaggacaactacctgaaaggtgttactaaactgttcgagcgtatttactccaccgacctgggccgtatgctgctgactagcatcgttcgcggtatcccgttctggggcggttctaccatcgataccgaactgaaagtaatcgacactaactgcatcaacgttattcagccggacggttcctatcgttccgaagaactgaacctggtgatcatcggcccgtctgctgatatcatccagttcgagtgtaagagctttggtcacgaagttctgaacctcacccgtaacggctacggttccactcagtacatccgtttctctccggacttcaccttcggttttgaagaatccctggaagtagacacgaacccactgctgggcgctggtaaattcgcaactgatcctgcggttaccctggctcacgaactgattcatgcaggccaccgcctgtacggtatcgccatcaatccgaaccgtgtcttcaaagttaacaccaacgcgtattacgagatgtccggtctggaagttagcttcgaagaactgcgtacttttggcggtcacgacgctaaattcatcgactctctgcaagaaaacgagttccgtctgtactactataacaagttcaaagatatcgcatccaccctgaacaaagcgaaatccatcgtgggtaccactgcttctctccagtacatgaagaacgtttttaaagaaaaatacctgctcagcgaagacacctccggcaaattctctgtagacaagttgaaattcgataaactttacaaaatgctgactgaaatttacaccgaagacaacttcgttaagttctttaaagttctgaaccgcaaaacctatctgaacttcgacaaggcagtattcaaaatcaacatcgtgccgaaagttaactacactatctacgatggtttcaacctgcgtaacaccaacctggctgctaattttaacggccagaacacggaaatcaacaacatgaacttcacaaaactgaaaaacttcactggtctgttcgagttttacaagctgctgtgcgtcgacggcatcattacctccaaaactaaatctctgatagaaggtagaaacaaagcgctgaacgacctctgtatcaaggttaacaactgggatttattcttcagcccgagtgaagacaacttcaccaacgacctgaacaaaggtgaagaaatcacctcagatactaacatcgaagcagccgaagaaaacatctcgctggacctgatccagcagtactacctgacctttaatttcgacaacgagccggaaaacatttctatcgaaaacctgagctctgatatcatcggccagctggaactgatgccgaacatcgaacgtttcccaaacggtaaaaagtacgagctggacaaatataccatgttccactacctgcgcgcgcaggaatttgaacacggcaaatcccgtatcgcactgactaactccgttaacgaagctctgctcaacccgtcccgtgtatacaccttcttctctagcgactacgtgaaaaaggtcaacaaagcgactgaagctgcaatgttcttgggttgggttgaacagcttgtttatgattttaccgacgagacgtccgaagtatctactaccgacaaaattgcggatatcactatcatcatcccgtacatcggtccggctctgaacattggcaacatgctgtacaaagacgacttcgttggcgcactgatcttctccggtgcggtgatcctgctggagttcatcccggaaatcgccatcccggtactgggcacctttgctctggtttcttacattgcaaacaaggttctgactgtacaaaccatcgacaacgcgctgagcaaacgtaacgaaaaatgggatgaagtttacaaatatatcgtgaccaactggctggctaaggttaatactcagatcgacctcatccgcaaaaaaatgaaagaagcactggaaaaccaggcggaagctaccaaggcaatcattaactaccagtacaaccagtacaccgaggaagaaaaaaacaacatcaacttcaacatcgacgatctgtcctctaaactgaacgaatccatcaacaaagctatgatcaacatcaacaagttcctgaaccagtgctctgtaagctatctgatgaactccatgatcccgtacggtgttaaacgtctggaggacttcgatgcgtctctgaaagacgccctgctgaaatacatttacgacaaccgtggcactctgatcggtcaggttgatcgtctgaaggacaaagtgaacaataccttatcgaccgacatcccttttcagctcagtaaatatgtcgataaccaacgccttttgtccactctagaaggcggtggcggtagcggcggtggcggtagcggcggtggcggtagcgcactagtgcgtccgccgggtttctctccgttccgttagaagctt

SEQ ID NO: 120 - protein, 896 aa, Artificial Sequence
  Synthetic sequence
GSMEFVNKQFNYKDPVNGVDIAYIKIPNAGQMQPVKAFKIHNKIWVIPERDTFTNPEEGDLNPPPEAKQVPVSYYDSTYLSTDNEKDNYLKGVTKLFERIYSTDLGRMLLTSIVRGIPFWGGSTIDTELKVIDTNCINVIQPDGSYRSEELNLVIIGPSADIIQFECKSFGHEVLNLTRNGYGSTQYIRFSPDFTFGFEESLEVDTNPLLGAGKFATDPAVTLAHELIHAGHRLYGIAINPNRVFKVNTNAYYEMSGLEVSFEELRTFGGHDAKFIDSLQENEFRLYYYNKFKDIASTLNKAKSIVGTTASLQYMKNVFKEKYLLSEDTSGKFSVDKLKFDKLYKMLTEIYTEDNFVKFFKVLNRKTYLNFDKAVFKINIVPKVNYTIYDGFNLRNTNLAANFNGQNTEINNMNFTKLKNFTGLFEFYKLLCVDGIITSKTKSLIEGRNKALNDLCIKVNNWDLFFSPSEDNFTNDLNKGEEITSDTNIEAAEENISLDLIQQYYLTFNFDNEPENISIENLSSDIIGQLELMPNIERFPNGKKYELDKYTMFHYLRAQEFEHGKSRIALTNSVNEALLNPSRVYTFFSSDYVKKVNKATEAAMFLGWVEQLVYDFTDETSEVSTTDKIADITIIIPYIGPALNIGNMLYKDDFVGALIFSGAVILLEFIPEIAIPVLGTFALVSYIANKVLTVQTIDNALSKRNEKWDEVYKYIVTNWLAKVNTQIDLIRKKMKEALENQAEATKAIINYQYNQYTEEEKNNINFNIDDLSSKLNESINKAMININKFLNQCSVSYLMNSMIPYGVKRLEDFDASLKDALLKYIYDNRGTLIGQVDRLKDKVNNTLSTDIPFQLSKYVDNQRLLSTLEGGGGSGGGGSGGGGSALVRPPGFSPFR

SEQ ID NO: 121 - protein, 895 aa, Artificial Sequence
  Synthetic sequence
GSMEFVNKQFNYKDPVNGVDIAYIKIPNAGQMQPVKAFKIHNKIWVIPERDTFTNPEEGDLNPPPEAKQVPVSYYDSTYLSTDNEKDNYLKGVTKLFERIYSTDLGRMLLTSIVRGIPFWGGSTIDTELKVIDTNCINVIQPDGSYRSEELNLVIIGPSADIIQFECKSFGHEVLNLTRNGYGSTQYIRFSPDFTFGFEESLEVDTNPLLGAGKFATDPAVTLAHELIHAGHRLYGIAINPNRVFKVNTNAYYEMSGLEVSFEELRTFGGHDAKFIDSLQENEFRLYYYNKFKDIASTLNKAKSIVGTTASLQYMKNVFKEKYLLSEDTSGKFSVDKLKFDKLYKMLTEIYTEDNFVKFFKVLNRKTYLNFDKAVFKINIVPKVNYTIYDGFNLRNTNLAANFNGQNTEINNMNFTKLKNFTGLFEFYKLLCVDGIITSKTKSLIEGRNKALNDLCIKVNNWDLFFSPSEDNFTNDLNKGEEITSDTNIEAAEENISLDLIQQYYLTFNFDNEPENISIENLSSDIIGQLELMPNIERFPNGKKYELDKYTMFHYLRAQEFEHGKSRIALTNSVNEALLNPSRVYTFFSSDYVKKVNKATEAAMFLGWVEQLVYDFTDETSEVSTTDKIADITIIIPYIGPALNIGNMLYKDDFVGALIFSGAVILLEFIPEIAIPVLGTFALVSYIANKVLTVQTIDNALSKRNEKWDEVYKYIVTNWLAKVNTQIDLIRKKMKEALENQAEATKAIINYQYNQYTEEEKNNINFNIDDLSSKLNESINKAMININKFLNQCSVSYLMNSMIPYGVKRLEDFDASLKDALLKYIYDNRGTLIGQVDRLKDKVNNTLSTDIPFQLSKYVDNQRLLSTLEGGGGSGGGGSGGGGSALVRPPGFSPF

SEQ ID NO: 122 - protein, 11 aa, Artificial Sequence
  Synthetic sequence
RPKPQQFFGLM

SEQ ID NO: 123 - protein, 11 aa, Artificial Sequence
  Synthetic sequence
KRAKFMMFFGL

SEQ ID NO: 124 - protein, 898 aa, Artificial Sequence
  Synthetic sequence
GSMEFVNKQFNYKDPVNGVDIAYIKIPNAGQMQPVKAFKIHNKIWVIPERDTFTNPEEGDLNPPPEAKQVPVSYYDSTYLSTDNEKDNYLKGVTKLFERIYSTDLGRMLLTSIVRGIPFWGGSTIDTELKVIDTNCINVIQPDGSYRSEELNLVIIGPSADIIQFECKSFGHEVLNLTRNGYGSTQYIRFSPDFTFGFEESLEVDTNPLLGAGKFATDPAVTLAHELIHAGHRLYGIAINPNRVFKVNTNAYYEMSGLEVSFEELRTFGGHDAKFIDSLQENEFRLYYYNKFKDIASTLNKAKSIVGTTASLQYMKNVFKEKYLLSEDTSGKFSVDKLKFDKLYKMLTEIYTEDNFVKFFKVLNRKTYLNFDKAVFKINIVPKVNYTIYDGFNLRNTNLAANFNGQNTEINNMNFTKLKNFTGLFEFYKLLCVDGIITSKTKSLIEGRNKALNDLCIKVNNWDLFFSPSEDNFTNDLNKGEEITSDTNIEAAEENISLDLIQQYYLTFNFDNEPENISIENLSSDIIGQLELMPNIERFPNGKKYELDKYTMFHYLRAQEFEHGKSRIALTNSVNEALLNPSRVYTFFSSDYVKKVNKATEAAMFLGWVEQLVYDFTDETSEVSTTDKIADITIIIPYIGPALNIGNMLYKDDFVGALIFSGAVILLEFIPEIAIPVLGTFALVSYIANKVLTVQTIDNALSKRNEKWDEVYKYIVTNWLAKVNTQIDLIRKKMKEALENQAEATKAIINYQYNQYTEEEKNNINFNIDDLSSKLNESINKAMININKFLNQCSVSYLMNSMIPYGVKRLEDFDASLKDALLKYIYDNRGTLIGQVDRLKDKVNNTLSTDIPFQLSKYVDNQRLLSTLEGGGGSGGGGSGGGGSALVKRAKFMMFFGL

SEQ ID NO: 125 - protein, 910 aa, Artificial Sequence
  Synthetic sequence
GSMPVTINNFNYNDPIDNNNIIMMEPPFARGTGRYYKAFKITDRIWIIPERYTFGYKPEDFNKSSGIFNRDVCEYYDPDYLNTNDKKNIFLQTMIKLFNRIKSKPLGEKLLEMIINGIPYLGDRRVPLEEFNTNIASVTVNKLISNPGEVERKKGIFANLIIFGPGPVLNENETIDIGIQNHFASREGFGGIMQMKFCPEYVSVFNNVQENKGASIFNRRGYFSDPALILMHELIHVLHGLYGIKVDDLPIVPNEKKFFMQSTDAIQAEELYTFGGQDPSIITPSTDKSIYDKVLQNFRGIVDRLNKVLVCISDPNININIYKNKFKDKYKFVEDSEGKYSIDVESFDKLYKSLMFGFTETNIAENYKIKTRASYFSDSLPPVKIKNLLDNEIYTIEEGFNISDKDMEKEYRGQNKAINKQAYEEISKEHLAVYKIQMCVDGIITSKTKSDDDDKFGGFTGARKSARKRKNQALAGGGGSGGGGSGGGGSALVLQCIDVDNEDLFFIADKNSFSDDLSKNERIEYNTQSNYIENDFPINELILDTDLISKIELPSENTESLTDFNVDVPVYEKQPAIKKIFTDENTIFQYLYSQTFPLDIRDISLTSSFDDALLFSNKVYSFFSMDYIKTANKVVEAGLFAGWVKQIVNDFVIEANKSNTMDKIADISLIVPYIGLALNVGNETAKGNFENAFEIAGASILLEFIPELLIPVVGAFLLESYIDNKNKIIKTIDNALTKRNEKWSDMYGLIVAQWLSTVNTQFYTIKEGMYKALNYQAQALEEIIKYRYNIYSEKEKSNINIDFNDINSKLNEGINQAIDNINNFINGCSVSYLMKKMIPLAVEKLLDFDNTLKKNLLNYIDENKLYLIGSAEYEKSKVNKYLKTIMPFDLSIYTNDTILIEMFNKYNSLD

SEQ ID NO: 126 - protein, 910 aa, Artificial Sequence
  Synthetic sequence
GSMTWPVKDFNYSDPVNDNDILYLRIPQNKLITTPVKAFMITQNIWVIPERFSSDTNPSLSKPPRPTSKYQSYYDPSYLSTDEQKDTFLKGIIKLFKRINERDIGKKLINYLVVGSPFMGDSSTPEDTFDFTRHTTNIAVEKFENGSWKVTNIITPSVLIFGPLPNILDYTASLTLQGQQSNPSFEGFGTLSILKVAPEFLLTFSDVTSNQSSAVLGKSIFCMDPVIALMHELTHSLHQLYGINIPSDKRIRPQVSEGFFSQDGPNVQFEELYTFGGLDVEIIPQIERSQLREKALGHYKDIAKRLNNINKTIPSSWISNIDKYKKIFSEKYNFDKDNTGNFVVNIDKFNSLYSDLTNVMSEVVYSSQYNVKNRTHYFSRHYLPVFANILDDNIYTIRDGFNLTNKGFNIENSGQNIERNPALQKLSSESVVDLFTKVCVDGIITSKTKSDDDDKFGGFTGARKSARKRKNQALAGGGGSGGGGSGGGGSALVLQCIKVKNNRLPYVADKDSISQEIFENKIITDETNVQNYSDKFSLDESILDGQVPINPEIVDPLLPNVNMEPLNLPGEEIVFYDDITKYVDYLNSYYYLESQKLSNNVENITLTTSVEEALGYSNKIYTFLPSLAEKVNKGVQAGLFLNWANEVVEDFTTNIMKKDTLDKISDVSVIIPYIGPALNIGNSALRGNFNQAFATAGVAFLLEGFPEFTIPALGVFTFYSSIQEREKIIKTIENCLEQRVKRWKDSYQWMVSNWLSRITTQFNHINYQMYDSLSYQADAIKAKIDLEYKKYSGSDKENIKSQVENLKNSLDVKISEAMNNINKFIRECSVTYLFKNMLPKVIDELNKFDLRTKTELINLIDSHNIILVGEVDRLKAKVNESFENTMPFNIFSYTNNSLLKDIINEYFNLD

SEQ ID NO: 127 - DNA, 1323 bp, Artificial Sequence
  Synthetic sequence
ggatccatgacgtggccagttaaggatttcaactactcagatcctgtaaatgacaacgatattctgtaccttcgcattccacaaaataaactgatcaccacaccagtcaaagcattcatgattactcaaaacatttgggtcattccagaacgcttttctagtgacacaaatccgagtttatctaaacctccgcgtccgacgtccaaatatcagagctattacgatccctcatatctcagtacggacgaacaaaaagatactttccttaaaggtatcattaaactgtttaagcgtattaatgagcgcgatatcgggaaaaagttgattaattatcttgttgtgggttccccgttcatgggcgatagctctacccccgaagacacttttgattttacccgtcatacgacaaacatcgcggtagagaagtttgagaacggatcgtggaaagtcacaaacatcattacacctagcgtcttaatttttggtccgctgccaaacatcttagattatacagccagcctgactttgcaggggcaacagtcgaatccgagtttcgaaggttttggtaccctgagcattctgaaagttgccccggaatttctgctcactttttcagatgtcaccagcaaccagagctcagcagtattaggaaagtcaattttttgcatggacccggttattgcactgatgcacgaactgacgcactctctgcatcaactgtatgggatcaacatccccagtgacaaacgtattcgtccccaggtgtctgaaggatttttctcacaggatgggccgaacgtccagttcgaagagttgtatactttcggaggcctggacgtagagatcattccccagattgagcgcagtcagctgcgtgagaaggcattgggccattataaggatattgcaaaacgcctgaataacattaacaaaacgattccatcttcgtggatctcgaatattgataaatataagaaaatttttagcgagaaatataattttgataaagataatacaggtaactttgtggttaacattgacaaattcaactccctttacagtgatttgacgaatgtaatgagcgaagttgtgtatagttcccaatacaacgttaagaatcgtacccattacttctctcgtcactacctgccggttttcgcgaacatccttgacgataatatttacactattcgtgacggctttaacttgaccaacaagggcttcaatattgaaaattcaggccagaacattgaacgcaacccggccttgcagaaactgtcgagtgaatccgtggttgacctgtttaccaaagtctgcgtcgac

SEQ ID NO: 128 - DNA, 1260 bp, Artificial Sequence
  Synthetic sequence
ctgcagtgtattaaagtgaaaaacaatcggctgccttatgtagcagataaagatagcattagtcaggagattttcgaaaataaaattatcactgacgaaaccaatgttcagaattattcagataaattttcactggacgaaagcatcttagatggccaagttccgattaacccggaaattgttgatccgttactgccgaacgtgaatatggaaccgttaaacctccctggcgaagagatcgtattttatgatgacattacgaaatatgtggactaccttaattcttattactatttggaaagccagaaactgtccaataacgtggaaaacattactctgaccacaagcgtggaagaggctttaggctactcaaataagatttataccttcctcccgtcgctggcggaaaaagtaaataaaggtgtgcaggctggtctgttcctcaactgggcgaatgaagttgtcgaagactttaccacgaatattatgaaaaaggataccctggataaaatctccgacgtctcggttattatcccatatattggccctgcgttaaatatcggtaatagtgcgctgcgggggaattttaaccaggcctttgctaccgcgggcgtcgcgttcctcctggagggctttcctgaatttactatcccggcgctcggtgtttttacattttactcttccatccaggagcgtgagaaaattatcaaaaccatcgaaaactgcctggagcagcgggtgaaacgctggaaagattcttatcaatggatggtgtcaaactggttatctcgcatcacgacccaattcaaccatattaattaccagatgtatgatagtctgtcgtaccaagctgacgccattaaagccaaaattgatctggaatataaaaagtactctggtagcgataaggagaacatcaaaagccaggtggagaaccttaagaatagtctggatgtgaaaatctctgaagctatgaataacattaacaaattcattcgtgaatgttcggtgacgtacctgttcaagaatatgctgccaaaagttattgatgaactgaataaatttgatctgcgtaccaaaaccgaacttatcaacctcatcgactcccacaacattatccttgtgggcgaagtggatcgtctgaaggccaaagtaaacgagagctttgaaaatacgatgccgtttaatattttttcatataccaataactccttgctgaaagatatcatcaatgaatatttcaatctagactagaagctt

SEQ ID NO: 129 - protein, 906 aa, Artificial Sequence
  Synthetic sequence
MGSMEFVNKQFNYKDPVNGVDIAYIKIPNAGQMQPVKAFKIHNKIWVIPERDTFTNPEEGDLNPPPEAKQVPVSYYDSTYLSTDNEKDNYLKGVTKLFERIYSTDLGRMLLTSIVRGIPFWGGSTIDTELKVIDTNCINVIQPDGSYRSEELNLVIIGPSADIIQFECKSFGHEVLNLTRNGYGSTQYIRFSPDFTFGFEESLEVDTNPLLGAGKFATDPAVTLAHELIHAGHRLYGIAINPNRVFKVNTNAYYEMSGLEVSFEELRTFGGHDAKFIDSLQENEFRLYYYNKFKDIASTLNKAKSIVGTTASLQYMKNVFKEKYLLSEDTSGKFSVDKLKFDKLYKMLTEIYTEDNFVKFFKVLNRKTYLNFDKAVFKINIVPKVNYTIYDGFNLRNTNLAANFNGQNTEINNMNFTKLKNFTGLFEFYKLLCVDGIITSKTKSDDDDKYGGFLGARKSARKRKNQALAGGGGSGGGGSGGGGSALVLQCIKVNNWDLFFSPSEDNFTNDLNKGEEITSDTNIEAAEENISLDLIQQYYLTFNFDNEPENISIENLSSDIIGQLELMPNIERFPNGKKYELDKYTMFHYLRAQEFEHGKSRIALTNSVNEALLNPSRVYTFFSSDYVKKVNKATEAAMFLGWVEQLVYDFTDETSEVSTTDKIADITIIIPYIGPALNIGNMLYKDDFVGALIFSGAVILLEFIPEIAIPVLGTFALVSYIANKVLTVQTIDNALSKRNEKWDEVYKYIVTNWLAKVNTQIDLIRKKMKEALENQAEATKAIINYQYNQYTEEEKNNINFNIDDLSSKLNESINKAMININKFLNQCSVSYLMNSMIPYGVKRLEDFDASLKDALLKYIYDNRGTLIGQVDRLKDKVNNTLSTDIPFQLSKYVDNQRLLSTLEALD

SEQ ID NO: 130 - protein, 909 aa, Artificial Sequence
  Synthetic sequence
ISEFGSMEFVNKQFNYKDPVNGVDIAYIKIPNAGQMQPVKAFKIHNKIWVIPERDTFTNPEEGDLNPPPEAKQVPVSYYDSTYLSTDNEKDNYLKGVTKLFERIYSTDLGRMLLTSIVRGIPFWGGSTIDTELKVIDTNCINVIQPDGSYRSEELNLVIIGPSADIIQFECKSFGHEVLNLTRNGYGSTQYIRFSPDFTFGFEESLEVDTNPLLGAGKFATDPAVTLAHELIHAGHRLYGIAINPNRVFKVNTNAYYEMSGLEVSFEELRTFGGHDAKFIDSLQENEFRLYYYNKFKDIASTLNKAKSIVGTTASLQYMKNVFKEKYLLSEDTSGKFSVDKLKFDKLYKMLTEIYTEDNFVKFFKVLNRKTYLNFDKAVFKINIVPKVNYTIYDGFNLRNTNLAANFNGQNTEINNMNFTKLKNFTGLFEFYKLLCVDGIITSKTKSLIEGRYGGFTGARKSARKRKNQALAGGGGSGGGGSGGGGSALVLQCIKVNNWDLFFSPSEDNFTNDLNKGEEITSDTNIEAAEENISLDLIQQYYLTFNFDNEPENISIENLSSDIIGQLELMPNIERFPNGKKYELDKYTMFHYLRAQEFEHGKSRIALTNSVNEALLNPSRVYTFFSSDYVKKVNKATEAAMFLGWVEQLVYDFTDETSEVSTTDKIADITIIIPYIGPALNIGNMLYKDDFVGALIFSGAVILLEFIPEIAIPVLGTFALVSYIANKVLTVQTIDNALSKRNEKWDEVYKYIVTNWLAKVNTQIDLIRKKMKEALENQAEATKAIINYQYNQYTEEEKNNINFNIDDLSSKLNESINKAMININKFLNQCSVSYLMNSMIPYGVKRLEDFDASLKDALLKYIYDNRGTLIGQVDRLKDKVNNTLSTDIPFQLSKYVDNQRLLSTLEALD

SEQ ID NO: 131 - protein, 903 aa, Artificial Sequence
  Synthetic sequence
MGSMEFVNKQFNYKDPVNGVDIAYIKIPNAGQMQPVKAFKIHNKIWVIPERDTFTNPEEGDLNPPPEAKQVPVSYYDSTYLSTDNEKDNYLKGVTKLFERIYSTDLGRMLLTSIVRGIPFWGGSTIDTELKVIDTNCINVIQPDGSYRSEELNLVIIGPSADIIQFECKSFGHEVLNLTRNGYGSTQYIRFSPDFTFGFEESLEVDTNPLLGAGKFATDPAVTLAHELIHAGHRLYGIAINPNRVFKVNTNAYYEMSGLEVSFEELRTFGGHDAKFIDSLQENEFRLYYYNKFKDIASTLNKAKSIVGTTASLQYMKNVFKEKYLLSEDTSGKFSVDKLKFDKLYKMLTEIYTEDNFVKFFKVLNRKTYLNFDKAVFKINIVPKVNYTIYDGFNLRNTNLAANFNGQNTEINNMNFTKLKNFTGLFEFYKLLCVDGIITSKTKSDDDDKFGGFTGARKSARKRKNQALAGGGGSGGGGSGGGGSALVLQCIKVNNWDLFFSPSEDNFTNDLNKGEEITSDTNIEAAEENISLDLIQQYYLTFNFDNEPENISIENLSSDIIGQLELMPNIERFPNGKKYELDKYTMFHYLRAQEFEHGKSRIALTNSVNEALLNPSRVYTFFSSDYVKKVNKATEAAMFLGWVEQLVYDFTDETSEVSTTDKIADITIIIPYIGPALNIGNMLYKDDFVGALIFSGAVILLEFIPEIAIPVLGTFALVSYIANKVLTVQTIDNALSKRNEKWDEVYKYIVTNWLAKVNTQIDLIRKKMKEALENQAEATKAIINYQYNQYTEEEKNNINFNIDDLSSKLNESINKAMININKFLNQCSVSYLMNSMIPYGVKRLEDFDASLKDALLKYIYDNRGTLIGQVDRLKDKVNNTLSTDIPFQLSKYVDNQRLLSTLD

SEQ ID NO: 132 - protein, 906 aa, Artificial Sequence
  Synthetic sequence
ISEFGSMEFVNKQFNYKDPVNGVDIAYIKIPNAGQMQPVKAFKIHNKIWVIPERDTFTNPEEGDLNPPPEAKQVPVSYYDSTYLSTDNEKDNYLKGVTKLFERIYSTDLGRMLLTSIVRGIPFWGGSTIDTELKVIDTNCINVIQPDGSYRSEELNLVIIGPSADIIQFECKSFGHEVLNLTRNGYGSTQYIRFSPDFTFGFEESLEVDTNPLLGAGKFATDPAVTLAHELIHAGHRLYGIAINPNRVFKVNTNAYYEMSGLEVSFEELRTFGGHDAKFIDSLQENEFRLYYYNKFKDIASTLNKAKSIVGTTASLQYMKNVFKEKYLLSEDTSGKFSVDKLKFDKLYKMLTEIYTEDNFVKFFKVLNRKTYLNFDKAVFKINIVPKVNYTIYDGFNLRNTNLAANFNGQNTEINNMNFTKLKNFTGLFEFYKLLCVDGIITSKTKSLIEGRNKALNDLCIKVNNWDLFFSPSEDNFTNDLNKGEEITSDTNIEAAEENISLDLIQQYYLTFNFDNEPENISIENLSSDIIGQLELMPNIERFPNGKKYELDKYTMFHYLRAQEFEHGKSRIALTNSVNEALLNPSRVYTFFSSDYVKKVNKATEAAMFLGWVEQLVYDFTDETSEVSTTDKIADITIIIPYIGPALNIGNMLYKDDFVGALIFSGAVILLEFIPEIAIPVLGTFALVSYIANKVLTVQTIDNALSKRNEKWDEVYKYIVTNWLAKVNTQIDLIRKKMKEALENQAEATKAIINYQYNQYTEEEKNNINFNIDDLSSKLNESINKAMININKFLNQCSVSYLMNSMIPYGVKRLEDFDASLKDALLKYIYDNRGTLIGQVDRLKDKVNNTLSTDIPFQLSKYVDNQRLLSTLEGGGGSGGGGSGGGGSALVVGRPEWWMDYQKRYG

SEQ ID NO: 133 - protein, 912 aa, Artificial Sequence
  Synthetic sequence
MGSMEFVNKQFNYKDPVNGVDIAYIKIPNAGQMQPVKAFKIHNKIWVIPERDTFTNPEEGDLNPPPEAKQVPVSYYDSTYLSTDNEKDNYLKGVTKLFERIYSTDLGRMLLTSIVRGIPFWGGSTIDTELKVIDTNCINVIQPDGSYRSEELNLVIIGPSADIIQFECKSFGHEVLNLTRNGYGSTQYIRFSPDFTFGFEESLEVDTNPLLGAGKFATDPAVTLAHELIHAGHRLYGIAINPNRVFKVNTNAYYEMSGLEVSFEELRTFGGHDAKFIDSLQENEFRLYYYNKFKDIASTLNKAKSIVGTTASLQYMKNVFKEKYLLSEDTSGKFSVDKLKFDKLYKMLTEIYTEDNFVKFFKVLNRKTYLNFDKAVFKINIVPKVNYTIYDGFNLRNTNLAANFNGQNTEINNMNFTKLKNFTGLFEFYKLLCVDGIITSKTKSDDDDKVGRPEWWMDYQKRYGALAGGGGSGGGGSGGGGSALVLQCIKVNNWDLFFSPSEDNFTNDLNKGEEITSDTNIEAAEENISLDLIQQYYLTFNFDNEPENISIENLSSDIIGQLELMPNIERFPNGKKYELDKYTMFHYLRAQEFEHGKSRIALTNSVNEALLNPSRVYTFFSSDYVKKVNKATEAAMFLGWVEQLVYDFTDETSEVSTTDKIADITIIIPYIGPALNIGNMLYKDDFVGALIFSGAVILLEFIPEIAIPVLGTFALVSYIANKVLTVQTIDNALSKRNEKWDEVYKYIVTNWLAKVNTQIDLIRKKMKEALENQAEATKAIINYQYNQYTEEEKNNINFNIDDLSSKLNESINKAMININKFLNQCSVSYLMNSMIPYGVKRLEDFDASLKDALLKYIYDNRGTLIGQVDRLKDKVNNTLSTDIPFQLSKYVDNQRLLSTLEALASGHHHHHH

SEQ ID NO: 134 - protein, 919 aa, Artificial Sequence
  Synthetic sequence
MGSMEFVNKQFNYKDPVNGVDIAYIKIPNAGQMQPVKAFKIHNKIWVIPERDTFTNPEEGDLNPPPEAKQVPVSYYDSTYLSTDNEKDNYLKGVTKLFERIYSTDLGRMLLTSIVRGIPFWGGSTIDTELKVIDTNCINVIQPDGSYRSEELNLVIIGPSADIIQFECKSFGHEVLNLTRNGYGSTQYIRFSPDFTFGFEESLEVDTNPLLGAGKFATDPAVTLAHELIHAGHRLYGIAINPNRVFKVNTNAYYEMSGLEVSFEELRTFGGHDAKFIDSLQENEFRLYYYNKFKDIASTLNKAKSIVGTTASLQYMKNVFKEKYLLSEDTSGKFSVDKLKFDKLYKMLTEIYTEDNFVKFFKVLNRKTYLNFDKAVFKINIVPKVNYTIYDGFNLRNTNLAANFNGQNTEINNMNFTKLKNFTGLFEFYKLLCVDGIITSKTKSDDDDKYGGFMRRVGRPEWWMDYQKRYGALAGGGGSGGGGSGGGGSALVLQCIKVNNWDLFFSPSEDNFTNDLNKGEEITSDTNIEAAEENISLDLIQQYYLTFNFDNEPENISIENLSSDIIGQLELMPNIERFPNGKKYELDKYTMFHYLRAQEFEHGKSRIALTNSVNEALLNPSRVYTFFSSDYVKKVNKATEAAMFLGWVEQLVYDFTDETSEVSTTDKIADITIIIPYIGPALNIGNMLYKDDFVGALIFSGAVILLEFIPEIAIPVLGTFALVSYIANKVLTVQTIDNALSKRNEKWDEVYKYIVTNWLAKVNTQIDLIRKKMKEALENQAEATKAIINYQYNQYTEEEKNNINFNIDDLSSKLNESINKAMININKFLNQCSVSYLMNSMIPYGVKRLEDFDASLKDALLKYIYDNRGTLIGQVDRLKDKVNNTLSTDIPFQLSKYVDNQRLLSTLEALASGHHHHHH

SEQ ID NO: 135 - protein, 931 aa, Artificial Sequence
  Synthetic sequence
ISEFGSMEFVNKQFNYKDPVNGVDIAYIKIPNAGQMQPVKAFKIHNKIWVIPERDTFTNPEEGDLNPPPEAKQVPVSYYDSTYLSTDNEKDNYLKGVTKLFERIYSTDLGRMLLTSIVRGIPFWGGSTIDTELKVIDTNCINVIQPDGSYRSEELNLVIIGPSADIIQFECKSFGHEVLNLTRNGYGSTQYIRFSPDFTFGFEESLEVDTNPLLGAGKFATDPAVTLAHELIHAGHRLYGIAINPNRVFKVNTNAYYEMSGLEVSFEELRTFGGHDAKFIDSLQENEFRLYYYNKFKDIASTLNKAKSIVGTTASLQYMKNVFKEKYLLSEDTSGKFSVDKLKFDKLYKMLTEIYTEDNFVKFFKVLNRKTYLNFDKAVFKINIVPKVNYTIYDGFNLRNTNLAANFNGQNTEINNMNFTKLKNFTGLFEFYKLLCVDGIITSKTKSLIEGRYGGFMTSEKSQTPLVTLFKNAIIKNAYKKGEALAGGGGSGGGGSGGGGSALVLQCIKVNNWDLFFSPSEDNFTNDLNKGEEITSDTNIEAAEENISLDLIQQYYLTFNFDNEPENISIENLSSDIIGQLELMPNIERFPNGKKYELDKYTMFHYLRAQEFEHGKSRIALTNSVNEALLNPSRVYTFFSSDYVKKVNKATEAAMFLGWVEQLVYDFTDETSEVSTTDKIADITIIIPYIGPALNIGNMLYKDDFVGALIFSGAVILLEFIPEIAIPVLGTFALVSYIANKVLTVQTIDNALSKRNEKWDEVYKYIVTNWLAKVNTQIDLIRKKMKEALENQAEATKAIINYQYNQYTEEEKNNINFNIDDLSSKLNESINKAMININKFLNQCSVSYLMNSMIPYGVKRLEDFDASLKDALLKYIYDNRGTLIGQVDRLKDKVNNTLSTDIPFQLSKYVDNQRLLSTLEALASGHHHHHH

SEQ ID NO: 136 - protein, 928 aa, Artificial Sequence
  Synthetic sequence
MGSMEFVNKQFNYKDPVNGVDIAYIKIPNAGQMQPVKAFKIHNKIWVIPERDTFTNPEEGDLNPPPEAKQVPVSYYDSTYLSTDNEKDNYLKGVTKLFERIYSTDLGRMLLTSIVRGIPFWGGSTIDTELKVIDTNCINVIQPDGSYRSEELNLVIIGPSADIIQFECKSFGHEVLNLTRNGYGSTQYIRFSPDFTFGFEESLEVDTNPLLGAGKFATDPAVTLAHELIHAGHRLYGIAINPNRVFKVNTNAYYEMSGLEVSFEELRTFGGHDAKFIDSLQENEFRLYYYNKFKDIASTLNKAKSIVGTTASLQYMKNVFKEKYLLSEDTSGKFSVDKLKFDKLYKMLTEIYTEDNFVKFFKVLNRKTYLNFDKAVFKINIVPKVNYTIYDGFNLRNTNLAANFNGQNTEINNMNFTKLKNFTGLFEFYKLLCVDGIITSKTKSLIEGRYGGFMTSEKSQTPLVTLFKNAIIKNAYKKGEALAGGGGSGGGGSGGGGSALVLQCIKVNNWDLFFSPSEDNFTNDLNKGEEITSDTNIEAAEENISLDLIQQYYLTFNFDNEPENISIENLSSDIIGQLELMPNIERFPNGKKYELDKYTMFHYLRAQEFEHGKSRIALTNSVNEALLNPSRVYTFFSSDYVKKVNKATEAAMFLGWVEQLVYDFTDETSEVSTTDKIADITIIIPYIGPALNIGNMLYKDDFVGALIFSGAVILLEFIPEIAIPVLGTFALVSYIANKVLTVQTIDNALSKRNEKWDEVYKYIVTNWLAKVNTQIDLIRKKMKEALENQAEATKAIINYQYNQYTEEEKNNINFNIDDLSSKLNESINKAMININKFLNQCSVSYLMNSMIPYGVKRLEDFDASLKDALLKYIYDNRGTLIGQVDRLKDKVNNTLSTDIPFQLSKYVDNQRLLSTLEALASGHHHHHH

SEQ ID NO: 137 - protein, 936 aa, Artificial Sequence
  Synthetic sequence
MGSMPVTINNFNYNDPIDNNNIIMMEPPFARGTGRYYKAFKITDRIWIIPERYTFGYKPEDFNKSSGIFNRDVCEYYDPDYLNTNDKKNIFLQTMIKLFNRIKSKPLGEKLLEMIINGIPYLGDRRVPLEEFNTNIASVTVNKLISNPGEVERKKGIFANLIIFGPGPVLNENETIDIGIQNHFASREGFGGIMQMKFCPEYVSVFNNVQENKGASIFNRRGYFSDPALILMHELIHVLHGLYGIKVDDLPIVPNEKKFFMQSTDAIQAEELYTFGGQDPSIITPSTDKSIYDKVLQNFRGIVDRLNKVLVCISDPNININIYKNKFKDKYKFVEDSEGKYSIDVESFDKLYKSLMFGFTETNIAENYKIKTRASYFSDSLPPVKIKNLLDNEIYTIEEGFNISDKDMEKEYRGQNKAINKQAYEEISKEHLAVYKIQMCVDGIITSKTKSLIEGRYGGFMTSEKSQTPLVTLFKNAIIKNAYKKGEALAGGGGSGGGGSGGGGSALVLQCIDVDNEDLFFIADKNSFSDDLSKNERIEYNTQSNYIENDFPINELILDTDLISKIELPSENTESLTDFNVDVPVYEKQPAIKKIFTDENTIFQYLYSQTFPLDIRDISLTSSFDDALLFSNKVYSFFSMDYIKTANKVVEAGLFAGWVKQIVNDFVIEANKSNTMDKIADISLIVPYIGLALNVGNETAKGNFENAFEIAGASILLEFIPELLIPVVGAFLLESYIDNKNKIIKTIDNALTKRNEKWSDMYGLIVAQWLSTVNTQFYTIKEGMYKALNYQAQALEEIIKYRYNIYSEKEKSNINIDFNDINSKLNEGINQAIDNINNFINGCSVSYLMKKMIPLAVEKLLDFDNTLKKNLLNYIDENKLYLIGSAEYEKSKVNKYLKTIMPFDLSIYTNDTILIEMFNKYNSLEALASGHHHHHH

SEQ ID NO: 138 - protein, 936 aa, Artificial Sequence
  Synthetic sequence
MGSMTWPVKDFNYSDPVNDNDILYLRIPQNKLITTPVKAFMITQNIWVIPERFSSDTNPSLSKPPRPTSKYQSYYDPSYLSTDEQKDTFLKGIIKLFKRINERDIGKKLINYLVVGSPFMGDSSTPEDTFDFTRHTTNIAVEKFENGSWKVTNIITPSVLIFGPLPNILDYTASLTLQGQQSNPSFEGFGTLSILKVAPEFLLTFSDVTSNQSSAVLGKSIFCMDPVIALMHELTHSLHQLYGINIPSDKRIRPQVSEGFFSQDGPNVQFEELYTFGGLDVEIIPQIERSQLREKALGHYKDIAKRLNNINKTIPSSWISNIDKYKKIFSEKYNFDKDNTGNFVVNIDKFNSLYSDLTNVMSEVVYSSQYNVKNRTHYFSRHYLPVFANILDDNIYTIRDGFNLTNKGFNIENSGQNIERNPALQKLSSESVVDLFTKVCVDGIITSKTKSLIEGRYGGFMTSEKSQTPLVTLFKNAIIKNAYKKGEALAGGGGSGGGGSGGGGSALVLQCIKVKNNRLPYVADKDSISQEIFENKIITDETNVQNYSDKFSLDESILDGQVPINPEIVDPLLPNVNMEPLNLPGEEIVFYDDITKYVDYLNSYYYLESQKLSNNVENITLTTSVEEALGYSNKIYTFLPSLAEKVNKGVQAGLFLNWANEVVEDFTTNIMKKDTLDKISDVSVIIPYIGPALNIGNSALRGNFNQAFATAGVAFLLEGFPEFTIPALGVFTFYSSIQEREKIIKTIENCLEQRVKRWKDSYQWMVSNWLSRITTQFNHINYQMYDSLSYQADAIKAKIDLEYKKYSGSDKENIKSQVENLKNSLDVKISEAMNNINKFIRECSVTYLFKNMLPKVIDELNKFDLRTKTELINLIDSHNIILVGEVDRLKAKVNESFENTMPFNIFSYTNNSLLKDIINEYFNLEALASGHHHHHH

SEQ ID NO: 139 - protein, 900 aa, Artificial Sequence
  Synthetic sequence
ISEFGSMEFVNKQFNYKDPVNGVDIAYIKIPNAGQMQPVKAFKIHNKIWVIPERDTFTNPEEGDLNPPPEAKQVPVSYYDSTYLSTDNEKDNYLKGVTKLFERIYSTDLGRMLLTSIVRGIPFWGGSTIDTELKVIDTNCINVIQPDGSYRSEELNLVIIGPSADIIQFECKSFGHEVLNLTRNGYGSTQYIRFSPDFTFGFEESLEVDTNPLLGAGKFATDPAVTLAHELIHAGHRLYGIAINPNRVFKVNTNAYYEMSGLEVSFEELRTFGGHDAKFIDSLQENEFRLYYYNKFKDIASTLNKAKSIVGTTASLQYMKNVFKEKYLLSEDTSGKFSVDKLKFDKLYKMLTEIYTEDNFVKFFKVLNRKTYLNFDKAVFKINIVPKVNYTIYDGFNLRNTNLAANFNGQNTEINNMNFTKLKNFTGLFEFYKLLCVDGIITSKTKSLIEGRNKALNDLCIKVNNWDLFFSPSEDNFTNDLNKGEEITSDTNIEAAEENISLDLIQQYYLTFNFDNEPENISIENLSSDIIGQLELMPNIERFPNGKKYELDKYTMFHYLRAQEFEHGKSRIALTNSVNEALLNPSRVYTFFSSDYVKKVNKATEAAMFLGWVEQLVYDFTDETSEVSTTDKIADITIIIPYIGPALNIGNMLYKDDFVGALIFSGAVILLEFIPEIAIPVLGTFALVSYIANKVLTVQTIDNALSKRNEKWDEVYKYIVTNWLAKVNTQIDLIRKKMKEALENQAEATKAIINYQYNQYTEEEKNNINFNIDDLSSKLNESINKAMININKFLNQCSVSYLMNSMIPYGVKRLEDFDASLKDALLKYIYDNRGTLIGQVDRLKDKVNNTLSTDIPFQLSKYVDNQRLLSTLEGGGGSGGGGSGGGGSALVRPPGFSPFR

SEQ ID NO: 140 - protein, 914 aa, Artificial Sequence
  Synthetic sequence
MGSMEFVNKQFNYKDPVNGVDIAYIKIPNAGQMQPVKAFKIHNKIWVIPERDTFTNPEEGDLNPPPEAKQVPVSYYDSTYLSTDNEKDNYLKGVTKLFERIYSTDLGRMLLTSIVRGIPFWGGSTIDTELKVIDTNCINVIQPDGSYRSEELNLVIIGPSADIIQFECKSFGHEVLNLTRNGYGSTQYIRFSPDFTFGFEESLEVDTNPLLGAGKFATDPAVTLAHELIHAGHRLYGIAINPNRVFKVNTNAYYEMSGLEVSFEELRTFGGHDAKFIDSLQENEFRLYYYNKFKDIASTLNKAKSIVGTTASLQYMKNVFKEKYLLSEDTSGKFSVDKLKFDKLYKMLTEIYTEDNFVKFFKVLNRKTYLNFDKAVFKINIVPKVNYTIYDGFNLRNTNLAANFNGQNTEINNMNFTKLKNFTGLFEFYKLLCVDGIITSKTKSDDDDKYGGFLRRIRPKLKWDNQALAGGGGSGGGGSGGGGSALVLQCIKVNNWDLFFSPSEDNFTNDLNKGEEITSDTNIEAAEENISLDLIQQYYLTFNFDNEPENISIENLSSDIIGQLELMPNIERFPNGKKYELDKYTMFHYLRAQEFEHGKSRIALTNSVNEALLNPSRVYTFFSSDYVKKVNKATEAAMFLGWVEQLVYDFTDETSEVSTTDKIADITIIIPYIGPALNIGNMLYKDDFVGALIFSGAVILLEFIPEIAIPVLGTFALVSYIANKVLTVQTIDNALSKRNEKWDEVYKYIVTNWLAKVNTQIDLIRKKMKEALENQAEATKAIINYQYNQYTEEEKNNINFNIDDLSSKLNESINKAMININKFLNQCSVSYLMNSMIPYGVKRLEDFDASLKDALLKYIYDNRGTLIGQVDRLKDKVNNTLSTDIPFQLSKYVDNQRLLSTLEALASGHHHHHH

SEQ ID NO: 141 - protein, 910 aa, Artificial Sequence
  Synthetic sequence
MGSMEFVNKQFNYKDPVNGVDIAYIKIPNAGQMQPVKAFKIHNKIWVIPERDTFTNPEEGDLNPPPEAKQVPVSYYDSTYLSTDNEKDNYLKGVTKLFERIYSTDLGRMLLTSIVRGIPFWGGSTIDTELKVIDTNCINVIQPDGSYRSEELNLVIIGPSADIIQFECKSFGHEVLNLTRNGYGSTQYIRFSPDFTFGFEESLEVDTNPLLGAGKFATDPAVTLAHELIHAGHRLYGIAINPNRVFKVNTNAYYEMSGLEVSFEELRTFGGHDAKFIDSLQENEFRLYYYNKFKDIASTLNKAKSIVGTTASLQYMKNVFKEKYLLSEDTSGKFSVDKLKFDKLYKMLTEIYTEDNFVKFFKVLNRKTYLNFDKAVFKINIVPKVNYTIYDGFNLRNTNLAANFNGQNTEINNMNFTKLKNFTGLFEFYKLLCVDGIITSKTKSDDDDKYGGFLRRIRPKLKALAGGGGSGGGGSGGGGSALVLQCIKVNNWDLFFSPSEDNFTNDLNKGEEITSDTNIEAAEENISLDLIQQYYLTFNFDNEPENISIENLSSDIIGQLELMPNIERFPNGKKYELDKYTMFHYLRAQEFEHGKSRIALTNSVNEALLNPSRVYTFFSSDYVKKVNKATEAAMFLGWVEQLVYDFTDETSEVSTTDKIADITIIIPYIGPALNIGNMLYKDDFVGALIFSGAVILLEFIPEIAIPVLGTFALVSYIANKVLTVQTIDNALSKRNEKWDEVYKYIVTNWLAKVNTQIDLIRKKMKEALENQAEATKAIINYQYNQYTEEEKNNINFNIDDLSSKLNESINKAMININKFLNQCSVSYLMNSMIPYGVKRLEDFDASLKDALLKYIYDNRGTLIGQVDRLKDKVNNTLSTDIPFQLSKYVDNQRLLSTLEALASGHHHHHH

SEQ ID NO: 142 - protein, 924 aa, Artificial Sequence
  Synthetic sequence
MGSMEFVNKQFNYKDPVNGVDIAYIKIPNAGQMQPVKAFKIHNKIWVIPERDTFTNPEEGDLNPPPEAKQVPVSYYDSTYLSTDNEKDNYLKGVTKLFERIYSTDLGRMLLTSIVRGIPFWGGSTIDTELKVIDTNCINVIQPDGSYRSEELNLVIIGPSADIIQFECKSFGHEVLNLTRNGYGSTQYIRFSPDFTFGFEESLEVDTNPLLGAGKFATDPAVTLAHELIHAGHRLYGIAINPNRVFKVNTNAYYEMSGLEVSFEELRTFGGHDAKFIDSLQENEFRLYYYNKFKDIASTLNKAKSIVGTTASLQYMKNVFKEKYLLSEDTSGKFSVDKLKFDKLYKMLTEIYTEDNFVKFFKVLNRKTYLNFDKAVFKINIVPKVNYTIYDGFNLRNTNLAANFNGQNTEINNMNFTKLKNFTGLFEFYKLLCVDGIITSKTKSDDDDKYGGFLRRIRPKLKWDNQALAGGGGSGGGGSGGGGSGGGGSGGGGSALVLQCIKVNNWDLFFSPSEDNFTNDLNKGEEITSDTNIEAAEENISLDLIQQYYLTFNFDNEPENISIENLSSDIIGQLELMPNIERFPNGKKYELDKYTMFHYLRAQEFEHGKSRIALTNSVNEALLNPSRVYTFFSSDYVKKVNKATEAAMFLGWVEQLVYDFTDETSEVSTTDKIADITIIIPYIGPALNIGNMLYKDDFVGALIFSGAVILLEFIPEIAIPVLGTFALVSYIANKVLTVQTIDNALSKRNEKWDEVYKYIVTNWLAKVNTQIDLIRKKMKEALENQAEATKAIINYQYNQYTEEEKNNINFNIDDLSSKLNESINKAMININKFLNQCSVSYLMNSMIPYGVKRLEDFDASLKDALLKYIYDNRGTLIGQVDRLKDKVNNTLSTDIPFQLSKYVDNQRLLSTLEALASGHHHHHH

SEQ ID NO: 143 - protein, 920 aa, Artificial Sequence
  Synthetic sequence
MGSMEFVNKQFNYKDPVNGVDIAYIKIPNAGQMQPVKAFKIHNKIWVIPERDTFTNPEEGDLNPPPEAKQVPVSYYDSTYLSTDNEKDNYLKGVTKLFERIYSTDLGRMLLTSIVRGIPFWGGSTIDTELKVIDTNCINVIQPDGSYRSEELNLVIIGPSADIIQFECKSFGHEVLNLTRNGYGSTQYIRFSPDFTFGFEESLEVDTNPLLGAGKFATDPAVTLAHELIHAGHRLYGIAINPNRVFKVNTNAYYEMSGLEVSFEELRTFGGHDAKFIDSLQENEFRLYYYNKFKDIASTLNKAKSIVGTTASLQYMKNVFKEKYLLSEDTSGKFSVDKLKFDKLYKMLTEIYTEDNFVKFFKVLNRKTYLNFDKAVFKINIVPKVNYTIYDGFNLRNTNLAANFNGQNTEINNMNFTKLKNFTGLFEFYKLLCVDGIITSKTKSDDDDKYGGFLRRIRPKLKALAGGGGSGGGGSGGGGSGGGGSGGGGSALVLQCIKVNNWDLFFSPSEDNFTNDLNKGEEITSDTNIEAAEENISLDLIQQYYLTFNFDNEPENISIENLSSDIIGQLELMPNIERFPNGKKYELDKYTMFHYLRAQEFEHGKSRIALTNSVNEALLNPSRVYTFFSSDYVKKVNKATEAAMFLGWVEQLVYDFTDETSEVSTTDKIADITIIIPYIGPALNIGNMLYKDDFVGALIFSGAVILLEFIPEIAIPVLGTFALVSYIANKVLTVQTIDNALSKRNEKWDEVYKYIVTNWLAKVNTQIDLIRKKMKEALENQAEATKAIINYQYNQYTEEEKNNINFNIDDLSSKLNESINKAMININKFLNQCSVSYLMNSMIPYGVKRLEDFDASLKDALLKYIYDNRGTLIGQVDRLKDKVNNTLSTDIPFQLSKYVDNQRLLSTLEALASGHHHHHH

SEQ ID NO: 144 - protein, 914 aa, Artificial Sequence
  Synthetic sequence
MGSMEFVNKQFNYKDPVNGVDIAYIKIPNAGQMQPVKAFKIHNKIWVIPERDTFTNPEEGDLNPPPEAKQVPVSYYDSTYLSTDNEKDNYLKGVTKLFERIYSTDLGRMLLTSIVRGIPFWGGSTIDTELKVIDTNCINVIQPDGSYRSEELNLVIIGPSADIIQFECKSFGHEVLNLTRNGYGSTQYIRFSPDFTFGFEESLEVDTNPLLGAGKFATDPAVTLAHELIHAGHRLYGIAINPNRVFKVNTNAYYEMSGLEVSFEELRTFGGHDAKFIDSLQENEFRLYYYNKFKDIASTLNKAKSIVGTTASLQYMKNVFKEKYLLSEDTSGKFSVDKLKFDKLYKMLTEIYTEDNFVKFFKVLNRKTYLNFDKAVFKINIVPKVNYTIYDGFNLRNTNLAANFNGQNTEINNMNFTKLKNFTGLFEFYKLLCVDGIITSKTKSDDDDKYGGFLRRIRPKLKWANQALAGGGGSGGGGSGGGGSALVLQCIKVNNWDLFFSPSEDNFTNDLNKGEEITSDTNIEAAEENISLDLIQQYYLTFNFDNEPENISIENLSSDIIGQLELMPNIERFPNGKKYELDKYTMFHYLRAQEFEHGKSRIALTNSVNEALLNPSRVYTFFSSDYVKKVNKATEAAMFLGWVEQLVYDFTDETSEVSTTDKIADITIIIPYIGPALNIGNMLYKDDFVGALIFSGAVILLEFIPEIAIPVLGTFALVSYIANKVLTVQTIDNALSKRNEKWDEVYKYIVTNWLAKVNTQIDLIRKKMKEALENQAEATKAIINYQYNQYTEEEKNNINFNIDDLSSKLNESINKAMININKFLNQCSVSYLMNSMIPYGVKRLEDFDASLKDALLKYIYDNRGTLIGQVDRLKDKVNNTLSTDIPFQLSKYVDNQRLLSTLEALASGHHHHHH

SEQ ID NO: 145 - protein, 924 aa, Artificial Sequence
  Synthetic sequence
MGSMEFVNKQFNYKDPVNGVDIAYIKIPNAGQMQPVKAFKIHNKIWVIPERDTFTNPEEGDLNPPPEAKQVPVSYYDSTYLSTDNEKDNYLKGVTKLFERIYSTDLGRMLLTSIVRGIPFWGGSTIDTELKVIDTNCINVIQPDGSYRSEELNLVIIGPSADIIQFECKSFGHEVLNLTRNGYGSTQYIRFSPDFTFGFEESLEVDTNPLLGAGKFATDPAVTLAHELIHAGHRLYGIAINPNRVFKVNTNAYYEMSGLEVSFEELRTFGGHDAKFIDSLQENEFRLYYYNKFKDIASTLNKAKSIVGTTASLQYMKNVFKEKYLLSEDTSGKFSVDKLKFDKLYKMLTEIYTEDNFVKFFKVLNRKTYLNFDKAVFKINIVPKVNYTIYDGFNLRNTNLAANFNGQNTEINNMNFTKLKNFTGLFEFYKLLCVDGIITSKTKSDDDDKYGGFLRRIRPKLKWANQALAGGGGSGGGGSGGGGSGGGGSGGGGSALVLQCIKVNNWDLFFSPSEDNFTNDLNKGEEITSDTNIEAAEENISLDLIQQYYLTFNFDNEPENISIENLSSDIIGQLELMPNIERFPNGKKYELDKYTMFHYLRAQEFEHGKSRIALTNSVNEALLNPSRVYTFFSSDYVKKVNKATEAAMFLGWVEQLVYDFTDETSEVSTTDKIADITIIIPYIGPALNIGNMLYKDDFVGALIFSGAVILLEFIPEIAIPVLGTFALVSYIANKVLTVQTIDNALSKRNEKWDEVYKYIVTNWLAKVNTQIDLIRKKMKEALENQAEATKAIINYQYNQYTEEEKNNINFNIDDLSSKLNESINKAMININKFLNQCSVSYLMNSMIPYGVKRLEDFDASLKDALLKYIYDNRGTLIGQVDRLKDKVNNTLSTDIPFQLSKYVDNQRLLSTLEALASGHHHHHH

SEQ ID NO: 146 - protein, 922 aa, Artificial Sequence
  Synthetic sequence
MGSMPVTINNFNYNDPIDNNNIIMMEPPFARGTGRYYKAFKITDRIWIIPERYTFGYKPEDFNKSSGIFNRDVCEYYDPDYLNTNDKKNIFLQTMIKLFNRIKSKPLGEKLLEMIINGIPYLGDRRVPLEEFNTNIASVTVNKLISNPGEVERKKGIFANLIIFGPGPVLNENETIDIGIQNHFASREGFGGIMQMKFCPEYVSVFNNVQENKGASIFNRRGYFSDPALILMHELIHVLHGLYGIKVDDLPIVPNEKKFFMQSTDAIQAEELYTFGGQDPSIITPSTDKSIYDKVLQNFRGIVDRLNKVLVCISDPNININIYKNKFKDKYKFVEDSEGKYSIDVESFDKLYKSLMFGFTETNIAENYKIKTRASYFSDSLPPVKIKNLLDNEIYTIEEGFNISDKDMEKEYRGQNKAINKQAYEEISKEHLAVYKIQMCVDGIITSKTKSDDDDKYGGFLRRIRPKLKWDNQALAGGGGSGGGGSGGGGSALVLQCIDVDNEDLFFIADKNSFSDDLSKNERIEYNTQSNYIENDFPINELILDTDLISKIELPSENTESLTDFNVDVPVYEKQPAIKKIFTDENTIFQYLYSQTFPLDIRDISLTSSFDDALLFSNKVYSFFSMDYIKTANKVVEAGLFAGWVKQIVNDFVIEANKSNTMDKIADISLIVPYIGLALNVGNETAKGNFENAFEIAGASILLEFIPELLIPVVGAFLLESYIDNKNKIIKTIDNALTKRNEKWSDMYGLIVAQWLSTVNTQFYTIKEGMYKALNYQAQALEEIIKYRYNIYSEKEKSNINIDFNDINSKLNEGINQAIDNINNFINGCSVSYLMKKMIPLAVEKLLDFDNTLKKNLLNYIDENKLYLIGSAEYEKSKVNKYLKTIMPFDLSIYTNDTILIEMFNKYNSLEALASGHHHHHH

SEQ ID NO: 147 - protein, 914 aa, Artificial Sequence
  Synthetic sequence
MGSMEFVNKQFNYKDPVNGVDIAYIKIPNAGQMQPVKAFKIHNKIWVIPERDTFTNPEEGDLNPPPEAKQVPVSYYDSTYLSTDNEKDNYLKGVTKLFERIYSTDLGRMLLTSIVRGIPFWGGSTIDTELKVIDTNCINVIQPDGSYRSEELNLVIIGPSADIIQFECKSFGHEVLNLTRNGYGSTQYIRFSPDFTFGFEESLEVDTNPLLGAGKFATDPAVTLAHELIHAGHRLYGIAINPNRVFKVNTNAYYEMSGLEVSFEELRTFGGHDAKFIDSLQENEFRLYYYNKFKDIASTLNKAKSIVGTTASLQYMKNVFKEKYLLSEDTSGKFSVDKLKFDKLYKMLTEIYTEDNFVKFFKVLNRKTYLNFDKAVFKINIVPKVNYTIYDGFNLRNTNLAANFNGQNTEINNMNFTKLKNFTGLFEFYKLLCVDGIITSKTKSDDDDKYGGFLRRRRRKLKWANQALAGGGGSGGGGSGGGGSALVLQCIKVNNWDLFFSPSEDNFTNDLNKGEEITSDTNIEAAEENISLDLIQQYYLTFNFDNEPENISIENLSSDIIGQLELMPNIERFPNGKKYELDKYTMFHYLRAQEFEHGKSRIALTNSVNEALLNPSRVYTFFSSDYVKKVNKATEAAMFLGWVEQLVYDFTDETSEVSTTDKIADITIIIPYIGPALNIGNMLYKDDFVGALIFSGAVILLEFIPEIAIPVLGTFALVSYIANKVLTVQTIDNALSKRNEKWDEVYKYIVTNWLAKVNTQIDLIRKKMKEALENQAEATKAIINYQYNQYTEEEKNNINFNIDDLSSKLNESINKAMININKFLNQCSVSYLMNSMIPYGVKRLEDFDASLKDALLKYIYDNRGTLIGQVDRLKDKVNNTLSTDIPFQLSKYVDNQRLLSTLEALASGHHHHHH

SEQ ID NO: 148 - protein, 910 aa, Artificial Sequence
  Synthetic sequence
MGSMEFVNKQFNYKDPVNGVDIAYIKIPNAGQMQPVKAFKIHNKIWVIPERDTFTNPEEGDLNPPPEAKQVPVSYYDSTYLSTDNEKDNYLKGVTKLFERIYSTDLGRMLLTSIVRGIPFWGGSTIDTELKVIDTNCINVIQPDGSYRSEELNLVIIGPSADIIQFECKSFGHEVLNLTRNGYGSTQYIRFSPDFTFGFEESLEVDTNPLLGAGKFATDPAVTLAHELIHAGHRLYGIAINPNRVFKVNTNAYYEMSGLEVSFEELRTFGGHDAKFIDSLQENEFRLYYYNKFKDIASTLNKAKSIVGTTASLQYMKNVFKEKYLLSEDTSGKFSVDKLKFDKLYKMLTEIYTEDNFVKFFKVLNRKTYLNFDKAVFKINIVPKVNYTIYDGFNLRNTNLAANFNGQNTEINNMNFTKLKNFTGLFEFYKLLCVDGIITSKTKSDDDDKYGGFLRRRRRKLKALAGGGGSGGGGSGGGGSALVLQCIKVNNWDLFFSPSEDNFTNDLNKGEEITSDTNIEAAEENISLDLIQQYYLTFNFDNEPENISIENLSSDIIGQLELMPNIERFPNGKKYELDKYTMFHYLRAQEFEHGKSRIALTNSVNEALLNPSRVYTFFSSDYVKKVNKATEAAMFLGWVEQLVYDFTDETSEVSTTDKIADITIIIPYIGPALNIGNMLYKDDFVGALIFSGAVILLEFIPEIAIPVLGTFALVSYIANKVLTVQTIDNALSKRNEKWDEVYKYIVTNWLAKVNTQIDLIRKKMKEALENQAEATKAIINYQYNQYTEEEKNNINFNIDDLSSKLNESINKAMININKFLNQCSVSYLMNSMIPYGVKRLEDFDASLKDALLKYIYDNRGTLIGQVDRLKDKVNNTLSTDIPFQLSKYVDNQRLLSTLEALASGHHHHHH

SEQ ID NO: 149 - protein, 921 aa, Artificial Sequence
  Synthetic sequence
MGSMEFVNKQFNYKDPVNGVDIAYIKIPNAGQMQPVKAFKIHNKIWVIPERDTFTNPEEGDLNPPPEAKQVPVSYYDSTYLSTDNEKDNYLKGVTKLFERIYSTDLGRMLLTSIVRGIPFWGGSTIDTELKVIDTNCINVIQPDGSYRSEELNLVIIGPSADIIQFECKSFGHEVLNLTRNGYGSTQYIRFSPDFTFGFEESLEVDTNPLLGAGKFATDPAVTLAHELIHAGHRLYGIAINPNRVFKVNTNAYYEMSGLEVSFEELRTFGGHDAKFIDSLQENEFRLYYYNKFKDIASTLNKAKSIVGTTASLQYMKNVFKEKYLLSEDTSGKFSVDKLKFDKLYKMLTEIYTEDNFVKFFKVLNRKTYLNFDKAVFKINIVPKVNYTIYDGFNLRNTNLAANFNGQNTEINNMNFTKLKNFTGLFEFYKLLCVDGIITSKTKSDDDDKYGGFLRRIRPKLKWDNQALAAEAAAKEAAAKEAAAKAGGGGSALVLQCIKVNNWDLFFSPSEDNFTNDLNKGEEITSDTNIEAAEENISLDLIQQYYLTFNFDNEPENISIENLSSDIIGQLELMPNIERFPNGKKYELDKYTMFHYLRAQEFEHGKSRIALTNSVNEALLNPSRVYTFFSSDYVKKVNKATEAAMFLGWVEQLVYDFTDETSEVSTTDKIADITIIIPYIGPALNIGNMLYKDDFVGALIFSGAVILLEFIPEIAIPVLGTFALVSYIANKVLTVQTIDNALSKRNEKWDEVYKYIVTNWLAKVNTQIDLIRKKMKEALENQAEATKAIINYQYNQYTEEEKNNINFNIDDLSSKLNESINKAMININKFLNQCSVSYLMNSMIPYGVKRLEDFDASLKDALLKYIYDNRGTLIGQVDRLKDKVNNTLSTDIPFQLSKYVDNQRLLSTLEALASGHHHHHH

SEQ ID NO: 150 - protein, 914 aa, Artificial Sequence
  Synthetic sequence
MGSMEFVNKQFNYKDPVNGVDIAYIKIPNAGQMQPVKAFKIHNKIWVIPERDTFTNPEEGDLNPPPEAKQVPVSYYDSTYLSTDNEKDNYLKGVTKLFERIYSTDLGRMLLTSIVRGIPFWGGSTIDTELKVIDTNCINVIQPDGSYRSEELNLVIIGPSADIIQFECKSFGHEVLNLTRNGYGSTQYIRFSPDFTFGFEESLEVDTNPLLGAGKFATDPAVTLAHELIHAGHRLYGIAINPNRVFKVNTNAYYEMSGLEVSFEELRTFGGHDAKFIDSLQENEFRLYYYNKFKDIASTLNKAKSIVGTTASLQYMKNVFKEKYLLSEDTSGKFSVDKLKFDKLYKMLTEIYTEDNFVKFFKVLNRKTYLNFDKAVFKINIVPKVNYTIYDGFNLRNTNLAANFNGQNTEINNMNFTKLKNFTGLFEFYKLLCVDGIITSKTKSDDDDKYGGFLGARKSARKRKNQALAGGGGSGGGGSGGGGSALVLQCIKVNNWDLFFSPSEDNFTNDLNKGEEITSDTNIEAAEENISLDLIQQYYLTFNFDNEPENISIENLSSDIIGQLELMPNIERFPNGKKYELDKYTMFHYLRAQEFEHGKSRIALTNSVNEALLNPSRVYTFFSSDYVKKVNKATEAAMFLGWVEQLVYDFTDETSEVSTTDKIADITIIIPYIGPALNIGNMLYKDDFVGALIFSGAVILLEFIPEIAIPVLGTFALVSYIANKVLTVQTIDNALSKRNEKWDEVYKYIVTNWLAKVNTQIDLIRKKMKEALENQAEATKAIINYQYNQYTEEEKNNINFNIDDLSSKLNESINKAMININKFLNQCSVSYLMNSMIPYGVKRLEDFDASLKDALLKYIYDNRGTLIGQVDRLKDKVNNTLSTDIPFQLSKYVDNQRLLSTLEALASGHHHHHH

SEQ ID NO: 151 - protein, 917 aa, Artificial Sequence
  Synthetic sequence
ISEFGSMEFVNKQFNYKDPVNGVDIAYIKIPNAGQMQPVKAFKIHNKIWVIPERDTFTNPEEGDLNPPPEAKQVPVSYYDSTYLSTDNEKDNYLKGVTKLFERIYSTDLGRMLLTSIVRGIPFWGGSTIDTELKVIDTNCINVIQPDGSYRSEELNLVIIGPSADIIQFECKSFGHEVLNLTRNGYGSTQYIRFSPDFTFGFEESLEVDTNPLLGAGKFATDPAVTLAHELIHAGHRLYGIAINPNRVFKVNTNAYYEMSGLEVSFEELRTFGGHDAKFIDSLQENEFRLYYYNKFKDIASTLNKAKSIVGTTASLQYMKNVFKEKYLLSEDTSGKFSVDKLKFDKLYKMLTEIYTEDNFVKFFKVLNRKTYLNFDKAVFKINIVPKVNYTIYDGFNLRNTNLAANFNGQNTEINNMNFTKLKNFTGLFEFYKLLCVDGIITSKTKSLIEGRFGGFTGARKSARKRKNQALAGGGGSGGGGSGGGGSALVLQCIKVNNWDLFFSPSEDNFTNDLNKGEEITSDTNIEAAEENISLDLIQQYYLTFNFDNEPENISIENLSSDIIGQLELMPNIERFPNGKKYELDKYTMFHYLRAQEFEHGKSRIALTNSVNEALLNPSRVYTFFSSDYVKKVNKATEAAMFLGWVEQLVYDFTDETSEVSTTDKIADITIIIPYIGPALNIGNMLYKDDFVGALIFSGAVILLEFIPEIAIPVLGTFALVSYIANKVLTVQTIDNALSKRNEKWDEVYKYIVTNWLAKVNTQIDLIRKKMKEALENQAEATKAIINYQYNQYTEEEKNNINFNIDDLSSKLNESINKAMININKFLNQCSVSYLMNSMIPYGVKRLEDFDASLKDALLKYIYDNRGTLIGQVDRLKDKVNNTLSTDIPFQLSKYVDNQRLLSTLEALASGHHHHHH

SEQ ID NO: 152 - protein, 928 aa, Artificial Sequence
  Synthetic sequence
ISEFGSEFMPITINNFNYSDPVDNKNILYLDTHLNTLANEPEKAFRITGNIWVIPDRFSRNSNPNLNKPPRVTSPKSGYYDPNYLSTDSDKDTFLKEIIKLFKRINSREIGEELIYRLSTDIPFPGNNNTPINTFDFDVDFNSVDVKTRQGNNWVKTGSINPSVIITGPRENIIDPETSTFKLTNNTFAAQEGFGALSIISISPRFMLTYSNATNDVGEGRFSKSEFCMDPILILMHELNHAMHNLYGIAIPNDQTISSVTSNIFYSQYNVKLEYAEIYAFGGPTIDLIPKSARKYFEEKALDYYRSIAKRLNSITTANPSSFNKYIGEYKQKLIRKYRFVVESSGEVTVNRNKFVELYNELTQIFTEFNYAKIYNVQNRKIYLSNVYTPVTANILDDNVYDIQNGFNIPKSNLNVLFMGQNLSRNPALRKVNPENMLYLFTKFCVDGIITSKTKSLIEGRFGGFTGARKSARKRKNQALAGGGGSGGGGSGGGGSALVLQCRELLVKNTDLPFIGDISDVKTDIFLRKDINEETEVIYYPDNVSVDQVILSKNTSEHGQLDLLYPSIDSESEILPGENQVFYDNRTQNVDYLNSYYYLESQKLSDNVEDFTFTRSIEEALDNSAKVYTYFPTLANKVNAGVQGGLFLMWANDVVEDFTTNILRKDTLDKISDVSAIIPYIGPALNISNSVRRGNFTEAFAVTGVTILLEAFPEFTIPALGAFVIYSKVQERNEIIKTIDNCLEQRIKRWKDSYEWMMGTWLSRIITQFNNISYQMYDSLNYQAGAIKAKIDLEYKKYSGSDKENIKSQVENLKNSLDVKISEAMNNINKFIRECSVTYLFKNMLPKVIDELNEFDRNTKAKLINLIDSHNIILVGEVDKLKAKVNNSFQNTIPFNIFSYTNNSLLKDIINEYFNLEALASGHHHHHH

SEQ ID NO: 153 - protein, 925 aa, Artificial Sequence
  Synthetic sequence
ISEFGSMTWPVKDFNYSDPVNDNDILYLRIPQNKLITTPVKAFMITQNIWVIPERFSSDTNPSLSKPPRPTSKYQSYYDPSYLSTDEQKDTFLKGIIKLFKRINERDIGKKLINYLVVGSPFMGDSSTPEDTFDFTRHTTNIAVEKFENGSWKVTNIITPSVLIFGPLPNILDYTASLTLQGQQSNPSFEGFGTLSILKVAPEFLLTFSDVTSNQSSAVLGKSIFCMDPVIALMHELTHSLHQLYGINIPSDKRIRPQVSEGFFSQDGPNVQFEELYTFGGLDVEIIPQIERSQLREKALGHYKDIAKRLNNINKTIPSSWISNIDKYKKIFSEKYNFDKDNTGNFVVNIDKFNSLYSDLTNVMSEVVYSSQYNVKNRTHYFSRHYLPVFANILDDNIYTIRDGFNLTNKGFNIENSGQNIERNPALQKLSSESVVDLFTKVCVDGIITSKTKSDDDDKFGGFTGARKSARKRKNQALAGGGGSGGGGSGGGGSALVLQCIKVKNNRLPYVADKDSISQEIFENKIITDETNVQNYSDKFSLDESILDGQVPINPEIVDPLLPNVNMEPLNLPGEEIVFYDDITKYVDYLNSYYYLESQKLSNNVENITLTTSVEEALGYSNKIYTFLPSLAEKVNKGVQAGLFLNWANEVVEDFTTNIMKKDTLDKISDVSVIIPYIGPALNIGNSALRGNFNQAFATAGVAFLLEGFPEFTIPALGVFTFYSSIQEREKIIKTIENCLEQRVKRWKDSYQWMVSNWLSRITTQFNHINYQMYDSLSYQADAIKAKIDLEYKKYSGSDKENIKSQVENLKNSLDVKISEAMNNINKFIRECSVTYLFKNMLPKVIDELNKFDLRTKTELINLIDSHNIILVGEVDRLKAKVNESFENTMPFNIFSYTNNSLLKDIINEYFNLEALASGHHHHHH

SEQ ID NO: 154 - protein, 917 aa, Artificial Sequence
  Synthetic sequence
ISEFGSMEFVNKQFNYKDPVNGVDIAYIKIPNAGQMQPVKAFKIHNKIWVIPERDTFTNPEEGDLNPPPEAKQVPVSYYDSTYLSTDNEKDNYLKGVTKLFERIYSTDLGRMLLTSIVRGIPFWGGSTIDTELKVIDTNCINVIQPDGSYRSEELNLVIIGPSADIIQFECKSFGHEVLNLTRNGYGSTQYIRFSPDFTFGFEESLEVDTNPLLGAGKFATDPAVTLAHELIHAGHRLYGIAINPNRVFKVNTNAYYEMSGLEVSFEELRTFGGHDAKFIDSLQENEFRLYYYNKFKDIASTLNKAKSIVGTTASLQYMKNVFKEKYLLSEDTSGKFSVDKLKFDKLYKMLTEIYTEDNFVKFFKVLNRKTYLNFDKAVFKINIVPKVNYTIYDGFNLRNTNLAANFNGQNTEINNMNFTKLKNFTGLFEFYKLLCVDGIITSKTKSLIEGRFGGFTGARKSARKLANQALAGGGGSGGGGSGGGGSALVLQCIKVNNWDLFFSPSEDNFTNDLNKGEEITSDTNIEAAEENISLDLIQQYYLTFNFDNEPENISIENLSSDIIGQLELMPNIERFPNGKKYELDKYTMFHYLRAQEFEHGKSRIALTNSVNEALLNPSRVYTFFSSDYVKKVNKATEAAMFLGWVEQLVYDFTDETSEVSTTDKIADITIIIPYIGPALNIGNMLYKDDFVGALIFSGAVILLEFIPEIAIPVLGTFALVSYIANKVLTVQTIDNALSKRNEKWDEVYKYIVTNWLAKVNTQIDLIRKKMKEALENQAEATKAIINYQYNQYTEEEKNNINFNIDDLSSKLNESINKAMININKFLNQCSVSYLMNSMIPYGVKRLEDFDASLKDALLKYIYDNRGTLIGQVDRLKDKVNNTLSTDIPFQLSKYVDNQRLLSTLEALASGHHHHHH

SEQ ID NO: 155 - protein, 922 aa, Artificial Sequence
  Synthetic sequence
MGSMPVTINNFNYNDPIDNNNIIMMEPPFARGTGRYYKAFKITDRIWIIPERYTFGYKPEDFNKSSGIFNRDVCEYYDPDYLNTNDKKNIFLQTMIKLFNRIKSKPLGEKLLEMIINGIPYLGDRRVPLEEFNTNIASVTVNKLISNPGEVERKKGIFANLIIFGPGPVLNENETIDIGIQNHFASREGFGGIMQMKFCPEYVSVFNNVQENKGASIFNRRGYFSDPALILMHELIHVLHGLYGIKVDDLPIVPNEKKFFMQSTDAIQAEELYTFGGQDPSIITPSTDKSIYDKVLQNFRGIVDRLNKVLVCISDPNININIYKNKFKDKYKFVEDSEGKYSIDVESFDKLYKSLMFGFTETNIAENYKIKTRASYFSDSLPPVKIKNLLDNEIYTIEEGFNISDKDMEKEYRGQNKAINKQAYEEISKEHLAVYKIQMCVDGIITSKTKSDDDDKFGGFTGARKSARKRKNQALAGGGGSGGGGSGGGGSALVLQCIDVDNEDLFFIADKNSFSDDLSKNERIEYNTQSNYIENDFPINELILDTDLISKIELPSENTESLTDFNVDVPVYEKQPAIKKIFTDENTIFQYLYSQTFPLDIRDISLTSSFDDALLFSNKVYSFFSMDYIKTANKVVEAGLFAGWVKQIVNDFVIEANKSNTMDKIADISLIVPYIGLALNVGNETAKGNFENAFEIAGASILLEFIPELLIPVVGAFLLESYIDNKNKIIKTIDNALTKRNEKWSDMYGLIVAQWLSTVNTQFYTIKEGMYKALNYQAQALEEIIKYRYNIYSEKEKSNINIDFNDINSKLNEGINQAIDNINNFINGCSVSYLMKKMIPLAVEKLLDFDNTLKKNLLNYIDENKLYLIGSAEYEKSKVNKYLKTIMPFDLSIYTNDTILIEMFNKYNSLEALASGHHHHHH

SEQ ID NO: 156 - protein, 917 aa, Artificial Sequence
  Synthetic sequence
ISEFGSMEFVNKQFNYKDPVNGVDIAYIKIPNAGQMQPVKAFKIHNKIWVIPERDTFTNPEEGDLNPPPEAKQVPVSYYDSTYLSTDNEKDNYLKGVTKLFERIYSTDLGRMLLTSIVRGIPFWGGSTIDTELKVIDTNCINVIQPDGSYRSEELNLVIIGPSADIIQFECKSFGHEVLNLTRNGYGSTQYIRFSPDFTFGFEESLEVDTNPLLGAGKFATDPAVTLAHELIHAGHRLYGIAINPNRVFKVNTNAYYEMSGLEVSFEELRTFGGHDAKFIDSLQENEFRLYYYNKFKDIASTLNKAKSIVGTTASLQYMKNVFKEKYLLSEDTSGKFSVDKLKFDKLYKMLTEIYTEDNFVKFFKVLNRKTYLNFDKAVFKINIVPKVNYTIYDGFNLRNTNLAANFNGQNTEINNMNFTKLKNFTGLFEFYKLLCVDGIITSKTKSLIEGRYGGFTGARKSARKRKNQALAGGGGSGGGGSGGGGSALVLQCIKVNNWDLFFSPSEDNFTNDLNKGEEITSDTNIEAAEENISLDLIQQYYLTFNFDNEPENISIENLSSDIIGQLELMPNIERFPNGKKYELDKYTMFHYLRAQEFEHGKSRIALTNSVNEALLNPSRVYTFFSSDYVKKVNKATEAAMFLGWVEQLVYDFTDETSEVSTTDKIADITIIIPYIGPALNIGNMLYKDDFVGALIFSGAVILLEFIPEIAIPVLGTFALVSYIANKVLTVQTIDNALSKRNEKWDEVYKYIVTNWLAKVNTQIDLIRKKMKEALENQAEATKAIINYQYNQYTEEEKNNINFNIDDLSSKLNESINKAMININKFLNQCSVSYLMNSMIPYGVKRLEDFDASLKDALLKYIYDNRGTLIGQVDRLKDKVNNTLSTDIPFQLSKYVDNQRLLSTLEALASGHHHHHH

SEQ ID NO: 157 - protein, 902 aa, Artificial Sequence
  Synthetic sequence
ISEFGSMEFVNKQFNYKDPVNGVDIAYIKIPNAGQMQPVKAFKIHNKIWVIPERDTFTNPEEGDLNPPPEAKQVPVSYYDSTYLSTDNEKDNYLKGVTKLFERIYSTDLGRMLLTSIVRGIPFWGGSTIDTELKVIDTNCINVIQPDGSYRSEELNLVIIGPSADIIQFECKSFGHEVLNLTRNGYGSTQYIRFSPDFTFGFEESLEVDTNPLLGAGKFATDPAVTLAHELIHAGHRLYGIAINPNRVFKVNTNAYYEMSGLEVSFEELRTFGGHDAKFIDSLQENEFRLYYYNKFKDIASTLNKAKSIVGTTASLQYMKNVFKEKYLLSEDTSGKFSVDKLKFDKLYKMLTEIYTEDNFVKFFKVLNRKTYLNFDKAVFKINIVPKVNYTIYDGFNLRNTNLAANFNGQNTEINNMNFTKLKNFTGLFEFYKLLCVDGIITSKTKSLIEGRNKALNDLCIKVNNWDLFFSPSEDNFTNDLNKGEEITSDTNIEAAEENISLDLIQQYYLTFNFDNEPENISIENLSSDIIGQLELMPNIERFPNGKKYELDKYTMFHYLRAQEFEHGKSRIALTNSVNEALLNPSRVYTFFSSDYVKKVNKATEAAMFLGWVEQLVYDFTDETSEVSTTDKIADITIIIPYIGPALNIGNMLYKDDFVGALIFSGAVILLEFIPEIAIPVLGTFALVSYIANKVLTVQTIDNALSKRNEKWDEVYKYIVTNWLAKVNTQIDLIRKKMKEALENQAEATKAIINYQYNQYTEEEKNNINFNIDDLSSKLNESINKAMININKFLNQCSVSYLMNSMIPYGVKRLEDFDASLKDALLKYIYDNRGTLIGQVDRLKDKVNNTLSTDIPFQLSKYVDNQRLLSTLEGGGGSGGGGSGGGGSALVKRAKFMMFFGL
